(19) United States
(12) Patent Application Publication
(10) Pub. No.: US 2023/0310650 A1
(43) Pub. Date: Oct. 5, 2023

(54) Bacterial Vehicle for Engineering of Non-Phagocytic Immune Cells

(71) Applicant: DANMARKS TEKNISKE UNIVERSITET, Kongens Lyngby (DK)

(72) Inventors: Scott QUAINOO, Kongens Lyngby (DK); Morten Otto Alexander SOMMER, Kongens Lyngby (DK); Sarah Aparecida SOARES, Kongens Lyngby (DK)

(21) Appl. No.: 18/014,649

(22) PCT Filed: Jul. 7, 2021
(86) PCT No.: PCT/EP2021/068734

§ 371 Date: Jan. 5, 2023

(30) Foreign Application Priority Data
Jul. 7, 2020 (EP) 20184439.6

(51) Int. Cl. A61K 48/00; A61K 38/16; A61K 39/00; A61K 31/7105; A61K 38/46; A61P 37/02

(52) U.S. Cl. CPC A61K 48/0025; A61K 38/164; A61K 38/162; A61K 39/4631; A61K 31/7105; A61K 38/465; A61P 37/02

(57) ABSTRACT

The invention provides an invasive recombinant bacterial cell for use in prevention and/or treatment of an immune-related disorder; said bacterial cell comprising one or more recombinant nucleic acid molecule(s) encoding one or more therapeutic agent(s) for use in prevention and/or treatment of said immune-related disease in a mammal in need thereof.

### FIELD OF THE INVENTION

[0001] The invention provides an invasive recombinant bacterium for use in prevention and/or treatment of an immune-related disorder; said bacterial cell comprising one or more recombinant nucleic acid molecule(s) encoding one or more therapeutic agent(s) for use in prevention and/or treatment of said immune-related disease in a mammal in need thereof.

### BACKGROUND

[0002] The cells of the mammalian immune system can be categorized as lymphocytes (T-cells, B-cells, and natural killer (NK) cells), granulocytes (Eosinophils, neutrophils, and basophils), and monocytes (macrophages and dendritic cells); which together provide resistance to infection, toxins and cancer. T-cells, B-cells, NK-cells together with basophil cells, are non-phagocytic, and comprise the main cells of the adaptive immune response, which includes the production of cytokines, antibodies, and complement proteins.

[0003] A wide range of diseases are attributable to the immune system. For example, when the immune system fails to distinguish self- from nonself-antigens, this results in a wide range of chronic autoimmune diseases (AIDs), whereby a self-reactive immune response, mediated by B-cell auto-antibodies and self-reactive T-cells, destroys the body's own tissues. Additionally, various types of cancer incapacitate the immune system, of itself, specifically blood cancers such as leukaemia, Non-Hodgkin lymphoma, Hodgkin lymphoma, B cell acute lymphocyte leukemia (ALL), refractory B cell lymphoma, or multiple myeloma. While the immune system plays a key role in preventing other cancers in its early stages, this protection is limited, since genetic changes amongst the cancer cells enable them to escape the immune system.

[0004] Targeted treatment of immune-related disorders is recognized as being essential, in order to avoid off-target serious adverse events, whether it be to restore immune tolerance in autoimmune diseases or to detect and eliminate pathogens or cancers. Genome editing (e.g. CRISPR-Cas9 system) and adoptive immunotherapy are among the tools that facilitate new strategies for targeted therapy, and potentially provide long term disease control. By way of example, T-cells derived from a patient can be engineered ex vivo with a retroviral vector to express a chromosomally encoded chimeric antigen receptor (CAR) that recognizes unique surface antigens expressed by tumor cells. Once re-introduced into the patient, the CAR T-cells bind with their engineered receptors to antigens on the tumor cells which initiate various signaling cascades that activate the CAR T-cells. The activated CAR T-cells then exert a cytotoxic response to recognized cancer cells and attract other immune cells to the site. As the CAR construct is introduced into the T-cell chromosome, proliferating activated CAR T-cells pass on their CAR constructs to daughter cells and therefore mount a sustained treatment effect from potentially a single treatment dose.

[0005] The use of adoptive cellular therapy for cancer treatment can be extended to other immune-related disorders. In the case of AIDs, the CAR-T cells are modified to target specific autoantigens or antibodies expressed on a pathogenic cell surface. More specifically, chimeric autoantibody receptor T (CAAR-T) cells are engineered to express a specific antigen that recognizes and binds to cognate autoantibodies expressed by the self-reactive antibody-producing B cells, leading to their elimination. Alternatively, regulatory T-cells (Treg) can be modified ex-vivo into CAR-Tregs having antigen specificity and used to treat AIDs by a pathogenic mechanism (Chen Y et al., 2019). Among the many diseases of the immune system whose treatment employs autologous gene therapy are various forms of immunodeficiency. For example, mutations in the Adenosine deaminase (ADA) gene results in autosomal recessive severe combined immunodeficiency (SCID), where absent or impaired ADA function causes the accumulation of the toxic metabolites adenosine, 2′deoxyadenosine and deoxyadenosine triphosphate (dATP), leading to severe lymphocytopaenia affecting T- and B-lymphocytes and NK cells. Gene therapy treatments rely on ex vivo gene engineering using retroviral vectors.

[0006] A common feature for the numerous current cell therapies of immune-related disorders is the need to engineer the target immune cells ex vivo using viral vectors, which adds both to the risks associated with the treatment (e.g.: toxicity of chemo/radio therapy during cell re-introduction, fear of mutating oncogenic viral vectors, etc.) and the technical complexity (e.g.: production bottlenecks of viral vectors, high loads of re-introduced engineered cells leading to excessive anti-/pro-inflammatory responses, lengthy and cumbersome treatment preparation, high treatment cost, etc.). The disadvantages related to current therapy give rise to a need to provide alternative tools and methods that would facilitate genome engineering and/or cellular regulation of cells of a patient's immune system in vivo or ex vivo.

### SUMMARY OF THE INVENTION

[0007] An invasive recombinant bacterial cell for use in prevention and/or treatment of an immune-related disorder; said bacterial cell comprising one or more recombinant nucleic acid molecule(s) encoding one or more therapeutic agent(s) for use in prevention and/or treatment of said immune-related disorder in a mammal; wherein said bacterial cell comprises one or more recombinant invasive gene(s) that facilitates invasion and release of said one or more recombinant nucleic acid molecule(s) or said one or more therapeutic agent(s) in a mammalian non-phagocytic immune cell and thereby functions as a bacteria-mediated delivery vector for in vivo or ex vivo delivery of said one or more recombinant nucleic acid molecule(s) or said one or more therapeutic agent(s) to the mammalian non-phagocytic immune cell, and wherein the immune-related disorder preferably is selected from the group: an autoimmune disorder, cancer, and a lymphoproliferative disorder.

[0008] In a further aspect thereof, the invasive recombinant bacterial cell for use in prevention and/or treatment of an immune-related disorder, is a cell comprising one or more recombinant invasive gene(s) for expressing protein(s) for invasion of non-phagocytic immune cells, said protein(s) selected from the group:
[0009] an 1.B.54 family invasin in combination with a 1.C.12.1.7 family cytolysin;
[0010] viral envelope glycoproteins, preferably comprising an HIV-1 glycoprotein 120 and a HIV-1 glycoprotein 41, in combination with a 1.B.12.8.2 family autotransporter-1; and
[0011] 1.C.36.3.1 Type III secretion proteins, preferably comprising GPI-anchored ipaB and ipaC proteins.

[0012] In a further aspect thereof, said mammalian non-phagocytic immune cell is a T-lymphocyte, B-lymphocyte, Natural Killer cell, or basophil.

[0013] In a further aspect thereof, said mammalian non-phagocytic immune cell is a member of the group consisting of a primate, bovine, ovine, porcine, feline, buffalo, canine, goat, equine, donkey, and camel cell.

[0014] In a further aspect thereof, said therapeutic agent is a recombinant or native DNA, RNA, or protein agent, or a combination thereof. Said agent may be selected from the group: a Chimeric Antigen Receptor; a small interfering RNA; a protein inhibitor of any one of T cell activation; T cell suppression; T cell proliferation and T cell cell death; a protein inducer of any one of T cell activation; T cell suppression; T cell proliferation and T cell cell death; a cytotoxin; a cytokine; a chemokine, and a CRISPR-Cas system.

[0015] In a further aspect thereof, said immune-related disorder is selected from the group: autoimmune disorder(s), cancer(s), and lymphoproliferative disorder(s).

[0016] In a second aspect the invention provides a method for prevention and/or treatment of an immune-related disorder in a mammal, the method comprising administering to a mammal diagnosed with said immune-related disorder, an invasive recombinant bacterial cell comprising one or more recombinant nucleic acid molecule(s) encoding one or more therapeutic agent(s); wherein said bacterial cell is capable, or engineered, to deliver said recombinant nucleic acid molecule(s) or said therapeutic agent(s) to a mammalian non-phagocytic immune cell. Delivery to said mammalian non-phagocytic immune cell may take place in-vivo, or ex-vivo followed by the step of re-introducing s the immune cell into the mammalian subject from which it was derived.

### DESCRIPTION OF THE INVENTION

### Definitions and Abbreviations

[0017] Disorder/Disease: A disease is a pathophysiological response to internal or external factors; while a disorder is a disruption to regular bodily structure and function. For the purpose of the present application the term “disorder” is to be understood to be an umbrella term that encompasses both a disease and a disorder in a mammalian subject that may be treated by the invasive recombinant bacterial cells of the present invention.

[0018] EMOPEC: “Empirical model and Oligos for Protein Expression Changes” used to predict Ribosomal Binding Site (RBS) strength (Bonde M T et al., 2016; http://emopec.biosustain.dtu.dk/).

[0019] Immune-related disorders are any diseases or disorders that can be treated, prevented or ameliorated by modulating at least one component of the host immune system; including autoimmune disorder(s); cancer(s); infectious disease(s), lymphoproliferative disorder(s), neurological and neurodegenerative diseases, and genetic disorder(s), and optionally somatic genetic disorder(s); and for which the invasive recombinant bacterial cells of the invention may be used as a bacteria-mediated delivery vector for providing said treatment, prevention or amelioration.

[0020] Invasive recombinant bacterial cell is a bacterial cell comprising invasive gene(s) or recombinant invasive gene(s) conferring the cell with the capability of ex-vivo and/or in vivo delivery of one or more recombinant nucleic acid molecules or therapeutic agent(s) comprised in said bacterial cell to a mammalian non-phagocytic immune cell.

[0021] Non-phagocytic immune cells: as defined herein are non-phagocytic T-cells, B-cells, natural killer cells, and basophils that are components of the mammalian adaptive immune system.

[0022] RT: Room temperature

[0023] TNP-KLM: 2,4,6, Trinitrophenyl hapten (TNP) conjugated to Keyhole Limpet Hemocyanin protein (KLM) via amide bonds to lysine.

### FIGURES

[0024] FIG. 1: Cartoon showing an engineered bacteria-mediated delivery vector delivering therapeutic genetic material or proteins to a non-phagocytic immune cell; where the bacterial vehicle is engineered to express invasion and lysis genes (as illustrated by the two component system Inv-Hly), which facilitate its uptake into a non-phagocytic immune cell, thereby delivering therapeutic recombinant nucleic acid molecule(s) or protein(s) that induce activation or lysis of the invaded immune cell.

[0025] FIG. 2: Plasmid maps

[0026] FIG. 3: Incucyte analysis of cell invasion: primary human activated T cells were infected with EcN expressing invasive construct ipaBC and cultured in the presence of antibiotics for 1 h 50 min. Post infection culture was performed inside an Incucyte live cell imager and fluorescent microscope images were taken every 30 minutes. a) Fluorescence microscopy images showing a cell containing pHRodo labelled bacteria at 1 h 50 min, with the arrow showing the invaded cell. b) Total integrated red fluorescence intensity average for each images cell is shown at 1 h 50 min. ipaBC+GFP=EcN+pCOLA−ipaBC−inaK+pZE3119−sfgfp, WT=EcN, NC=Uninfected cells, PC=EcN in citrate buffer. Error bars show SEM. N=5.

[0027] FIG. 4: Incucyte analysis of inv-hly BACTERIAL INTRACELLULAR DELIVERY VECTOR invasion of Jurkat cells. Jurkat E6-1 cells were infected with invasive EcN-Tn7::GFP at different MOIs and cultured in the presence of antibiotics for several days. Post infection culture was performed inside an Incucyte live cell imager and fluorescent microscope images were taken hourly. a) Images show representative events of intracellular bacterial replication at indicated MOIs. Numbers inside the images indicate DD:HH. b) Quantification of invaded cells where the percentage of cells containing green bacteria but not showing red autofluorescence is shown on the y-axis over time on the x-axis. Cell only where uninfected control cells. Error bars show SEM. N=3.

[0028] FIG. 5: Fluorescence microscopy analysis of cell invasion. Jurkat E6-1 (a&c) or human PBMCs (b) were infected for 1 hour with invasive (pSQ11 & pV3) or wild type (WT) EcN strains harbouring a sfGFP plasmid. a) Total and internalised bacteria were labelled with GFP in green, extracellular bacteria with anti-E. coli LPS antibody in red (Atto550), and Jurkat CD49D integrin with anti-CD49D antibody in blue (BV480). b) Total and internalised bacteria were labelled with GFP in green, extracellular bacteria with anti-E. coli LPS antibody in red (Atto550), and cellular DNA with DAPI in blue. c) Total and internalised bacteria were labelled with GFP in green, extracellular bacteria with anti-E. coli LPS antibody pseudocoloured in red (AF350), and Jurkat actin, after permeabilisation, with Rhodamine phalloidin pseudocoloured in blue. Arrows indicate locations of intracellular bacteria.

[0029] FIG. 6: inv-hly mediated DNA transfer. Jurkat E6-1 cells were infected with invasive (pGB2Ωinv-hly) E. coli BM2710 carrying an anti-CD3d shRNA-mCherry reporter plasmid or no reporter. After infection, cells were cultured in the presence of antibiotics for several days and imaged in an Incucyte instrument. a) Fluorescence microscopy images following the mCherry expression of an invaded cell over time. mCherry indicates reporter plasmid expression, Cyto green indicated labelling with the Incucyte Cytolight Rapid Green live cell marker. b) Average number of mCherry+& cytolight rapid green+cells per image over time. Error bars show SEM. N=3.

[0030] FIG. 7: Inv-hly mediated protein transfer. Jurkat E6-1 cells were infected with invasive (V3) EcN expressing b-lactamase or non-expressign, non-invasive EcN (WT) at MOI 640 or 1280. After infection, cells were incubated in the presence of antibiotics followed by loading with CCF4-AM. Loaded cells were analysed on a flow cytometer to determine percentages of blue cells, indicative of protein transfer. Green vs blue fluorescence plots for singlet Jurkat cells.

[0031] FIG. 8: inv-hly mediated therapeutic protein transfer. Primary human activated T cells were infected with E. coli Top10 carrying an invasive plasmid alone (pGB3) or a modified invasive plasmid that also encoded the therapeutic protein OspF (pGB4). After infection, cells were incubated in the presence of antibiotics for up to 48 h. Cells were analysed on a flow cytometer to determine percentages of phosphorylated transcription factor ERK (p-Erk) from the total ERK (t-Erk) pool. a) Gating strategy for the t-Erk gate based on the live T cell population. b) Validation of the t-Erk gating strategy based on the total live event population. c) p-Erk percentages of t-Erk over time. *P<0.05, **P<0.005, ***P<0.0005****P<0.0001. Two-way analysis of variance (ANOVA) with Tukey's multiple comparisons test. Error bars show SEM. d) Average values of t-Erk % of all T cells and p-Erk % of all t-Erk+ cells. N=3.

[0032] FIG. 9: Process of gp140 mediated bacterial invasion of immune cells. In step 1, the gp120 protein part of the gp140 complex binds to the CD4 receptor on a target T cell. Binding to CD4 changes gp140 conformation and exposes the binding sites of gp41. Upon exposure gp41 binds to the co-receptor CCR5 which pulls the bacterial outer membrane and the T cell membrane closer together. In step 2, close proximity of both membranes leads to membrane fusion. In step 3, therapeutic molecules located in the bacterial periplasm get released into the T cell cytoplasm to interact with intracellular targets. In step 4, the bacterial inner membrane eventually lyses due to structural integrity loss and bacterial auxotrophies, which releases cytoplasmic therapeutic DNA or other molecules into the T cell cytoplasm.

[0033] FIG. 10: Fluorescence microscopy images of bacterial gp140 surface expression. E. coli TOP10 expressing the gp140 delivery construct was labelled with FITC conjugated anti-gp160 antibody and imaged to confirm surface expression of the protein complex. Red boxes are zoomed in from images on the FITC channel.

[0034] FIG. 11: gp140 mediated periplasmic protein transfer. Primary human activated T cells were infected with E. coli Shuffle T7 carrying an invasive gp140 plasmid either together or without an mTurquoise reporter plasmid. Following culture for 6 hours in the presence of antibiotics, cells were analysed on a flow cytometer (a&b) and fluorescence microscopy (c) for mTurquoise2 expression. a&b) data points show individual values for 3 replicates per condition. c) White arrow heads indicate adherent bacteria that lacked mTurquoise2 expression. The white circle indicates a non-adherent bacterial cells that lacked mTurquise2 expression. mTurquoise was pseudocolored to cyan. KO525-A+=mTurquoise detection filter.

[0035] FIG. 12: Gating strategy for gp140 mediated secreted protein transfer to primary lymphocytes. Plots are shown for the uninfected cell control (NC) at 2 h p.i.

[0036] FIG. 13: Percentages of live, lymphocytes, singlets, and CD3+ subtypes for for gp140 mediated secreted protein transfer to primary lymphocytes.

[0037] FIG. 14: Lymphocyte gating strategy for gp140 mediated secreted protein transfer to primary lymphocytes.

[0038] FIG. 15: gp140 mediated secreted protein transfer. Primary human lymphocytes were isolated from buffy coats and infected with E. coli Shuffle T7 carrying an invasive gp140 plasmid either together (gp140+TEM-1) or without (gp140) a β-lactamase reporter plasmid. After infection, cells were incubated in the presence of antibiotics followed by loading with CCF4-AM. Loaded cells were analysed on a flow cytometer to determine percentages of blue cells, indicative of protein transfer. a) Percentage of blue cells from CD3+ cells. b) Percentage of blue cells from all CD3− cells. c) Cell subtype percentages of blue CD3+ cells. d) Cell subtype percentages of blue CD3− cells. e) Comparison of cell subtype percentages between blue CD3+ cells and all CD3+ cells at 2 h p.i. f) Comparison of cell subtype percentages between blue CD3+ cells and all CD3+ cells at 4 h p.i. g) Comparison of cell subtype percentages between blue CD3− cells and all CD3− cells at 2 h p.i. h) Comparison of cell subtype percentages between blue CD3− cells and all CD3− cells at 4 h p.i. *P<0.05, **P<0.005, ***P<0.0005****P<0.0001. two-way analysis of variance (ANOVA) with Tukey's multiple comparisons test for comparisons with more than 2 variables (a&b) or Šidák's multiple comparisons test for comparisons with less than 3 variables (c-h). Error bars show SEM. N=3.

[0039] FIG. 16: gp140 mediated secreted protein transfer. Primary human activated T cells were infected with E. coli Shuffle T7 carrying an invasive gp140 plasmid either together (gp140+TEM-1) or without (gp140) a β-lactamase reporter plasmid. After infection, cells were incubated in the presence of antibiotics followed by loading with CCF4-AM. Loaded cells were analysed on a flow cytometer to determine percentages of blue cells, indicative of protein transfer. a) Percentage of identified T cells from all events. b) Percentage of blue cells from all cells. *P<0.05, **P<0.005, ****P<0.0001; two-way analysis of variance (ANOVA) with Tukey's multiple comparisons test. Error bars show SEM. N=3.

[0040] FIG. 17: gp140 mediated secreted protein transfer. Primary human lymphocytes were isolated from buffy coats and infected with E. coli Shuffle T7 carrying an invasive gp140 plasmid either together (gp140+TEM-1) or without (gp140) a β-lactamase reporter plasmid. After infection, cells were incubated in the presence of antibiotics followed by loading with CCF4-AM. Loaded cells were analysed on a flow cytometer to determine percentages of blue cells, indicative of protein transfer. a) Percentage of blue cells from all lymphocytes. b) CD3+ and CD3− percentages of blue lymphocytes at 2 h p.i. c) CD3+ and CD3− percentages of blue lymphocytes at 4 h p.i. *P<0.05, **P<0.005, ***P<0.0005****P<0.0001. two-way analysis of variance (ANOVA) with Tukey's multiple comparisons test. Error bars show SEM. N=3.

[0041] FIG. 18: Comparison of injection routes. Healthy CB6F1 mice were injected either intravenously (i.v.) or intraperitoneal (i.p.) with 1×108 cfu/injection of the auxotrophic and invasive EcNΔdapA+pSQ11. a) CFUs of bacteria recovered from tail vein blood samples at indicated timepoints. b) Weight of major organs after 1 week. c) Total body weight or mice before (Od) and 1 week after (7d) injection. *P<0.05; two-way analysis of variance (ANOVA) with Tukey's multiple comparisons test for comparisons with more than 2 variables (a&b) or Šidák's multiple comparisons test for comparisons with less than 3 variables (c-h). Error bars show SEM. N=3.

[0042] FIG. 19: Maximum tolerated injection dose in rodents. Healthy CB6F1 mcie (a&b) or Sprague Dawley rats (c&d) were injected with different concentrations of auxotrophic and invasive EcNΔdapA+pSQ11. a&c) Total body weight per animal for different injection doses. b&d) Body temperature per animal for different injection doses. *P<0.05; two-way analysis of variance (ANOVA) with Tukey's multiple comparisons test. Error bars show SEM. N=2. Cross indicates dead animal. ND=no data.

[0043] FIG. 20: Immunofluorescence microscopy images of Hela cells following infection with cells of engineered EcN invasive strain (harboring pSQ11) and harboring a mammalian mCherry reporter plasmid (PL0017) at a MOI of 50. Arrows indicate fluorescent cells. Split arrows indicate cell replication events. Times above the images indicate days (d), hours (h), and minutes (m) post infection.

### DETAILED DESCRIPTION

[0044] The invasive recombinant bacterial cell of the invention comprises one or more recombinant nucleic acid molecules encoding one or more therapeutic agent(s) for use in the prevention and/or treatment of an immune-related disorder in a subject in need thereof. The recombinant bacterial cell functions as a bacteria-mediated delivery vector for in vivo or ex-vivo delivery of said one or more recombinant nucleic acid molecules or said one or more therapeutic agent(s) encoded by said one or more recombinant nucleic acid molecules to a mammalian non-phagocytic immune cell for use in prevention and/or treatment of an immune-related disorder in a subject. FIG. 1 represents an illustration of the invention. The non-phagocytic immune cell and the subject at risk of developing and/or diagnosed as having an immune-related disorder is mammalian, such as a primate, bovine, ovine, porcine, feline, buffalo, canine, goat, equine, donkey, and camel, in particular a human primate.

[0045] I. A Bacteria-Mediated Delivery Vector

[0046] In one aspect, the invasive recombinant bacterial cell is engineered to express one or more genes that enable the cell to both invade and release its therapeutic payload in a non-phagocytic immune cell. Expression of the one or more genes enables the recombinant bacterial cell to both invade the non-phagocytic immune cell, where it is typically internalized in primary vesicles (such as phagosomes); and to then escape into the cytosol due to induced permeabilization of the primary vesicles. Once the recombinant bacterial cell has escaped, it is genetically adapted to undergo lysis and thereby release its therapeutic payload into the cytosol, such that the therapeutic payload can bring about a therapeutic effect on, or by means of, said non-phagocytic immune cell. Examples of recombinant bacterial cells engineered for this purpose are detailed below:

[0047] In one example, the invasive recombinant bacterial cell of the invention comprises genes encoding a first protein belonging to the 1.B.54 family of Intimin/Invasin (Int/Inv) or Autotransporter-3 (AT-3) proteins; and a second protein belonging to the 1.C.12.1.7 family of thiol-activated cholesterol-dependent cytolysin (cdc) proteins, where the expression of said first and second proteins confers on the cell the ability to act as a bacteria-mediated delivery vector for delivery of the therapeutic agent to a mammalian non-phagocytic immune cell.

[0048] The first protein, belonging to the 1.B.54 family of homologous proteins, is an outer membrane (OM) protein found in strains of Yersinia spp. (Inv), pathogenic E. coli (Int), and Citrobacter spp (Int) [Example 1]. Expression of the first protein by the recombinant bacterial cell mediates its attachment to, and invasion of, the mammalian non-phagocytic immune cell. A suitable first protein includes an invasin belonging to the 1.B.54.1.2 sub-family, such as an invasin derivable from pathogen Yersinia pseudotuberculosis.

[0049] Expression of Y. pseudotuberculosis invasin by the recombinant bacterial cell, as shown herein [Example 3], both mediates invasion of an immune cell, and its subsequent uptake into the immune cell's phagolysosome. While not bound by theory, said invasion may occur when the outer membrane invasin binds to an integrin on the surface of the target non-phagocytic immune cell, such as an integrin belonging to one or more of subtypes α3β1, α4β1, α5β1, and α6β1 integrin.

[0050] In one aspect, when the first protein is an invasin, the primary amino acid sequence of said protein may be one having at least 70, 71, 73, 74, 75, 76, 77, 78, 79, 80, 81, 82, 83, 84, 85, 86, 87, 88, 89, 90, 91, 92, 93, 94, 95, 96, 97, 98, 99 or 100% sequence identity to SEQ ID NO: 2. Alternatively, the amino acid sequence of said protein is modified, by the substitution of its signal peptide sequence with the sequence of a signal peptide native to the recombinant bacterium in which the first protein is expressed [Example 3]. For example, where the recombinant bacterium is a strain of E. coli, then the primary amino acid sequence of the invasin comprising a substitute E. coli signal peptide is one having at least 70, 71, 73, 74, 75, 76, 77, 78, 79, 80, 81, 82, 83, 84, 85, 86, 87, 88, 89, 90, 91, 92, 93, 94, 95, 96, 97, 98, 99 or 100% sequence identity to SEQ ID NO: 4.

[0051] The second protein, belonging to the 1.C.12.1.7 family of homologous proteins, is a cytolysin found in strains of Listeria monocytogenes. Following invasion of a non-phagocytic immune cell and its inclusion in a primary vesicle (e.g. phagocyte), the cytolysin, expressed and secreted by the recombinant bacterial cell, causes the formation of pores in the primary vesicle membrane of the immune cell, allowing escape of the bacterial cell into the cytosol. A suitable second protein includes a Listeriolysin O derivable from Listeria monocytogenes serovar 1/2a. Expression of a combination of the L. monocytogenes Listeriolysin O and the Y. pseudotuberculosis invasin by the recombinant bacterial cell, as shown herein [Example 3], both mediates invasion of an immune cell, and its subsequent release from the immune cell's phagolysosome. While not bound by theory, the acidic conditions within the phagolysosome may induce folding and activation of pore-forming properties of the Listeriolysin O when expressed by the recombinant bacterium, while once released into the cytoplasm it is inactivated by the neutral pH.

[0052] In one aspect, when the second protein is an Listeriolysin O, the amino acid sequence of said protein may be one having at least 70, 71, 73, 74, 75, 76, 77, 78, 79, 80, 81, 82, 83, 84, 85, 86, 87, 88, 89, 90, 91, 92, 93, 94, 95, 96, 97, 98, 99 or 100% sequence identity to SEQ ID NO: 6. Alternatively, the amino acid sequence of said protein is modified, by the substitution of its signal peptide sequence with the sequence of a signal peptide native to the recombinant bacterium in which the second protein is expressed [Example 3]. For example, where the recombinant bacterium is a strain of E. coli, then the primary amino acid sequence of the Listeriolysin O comprising a substitute E. coli signal peptide is one having at least 70, 71, 73, 74, 75, 76, 77, 78, 79, 80, 81, 82, 83, 84, 85, 86, 87, 88, 89, 90, 91, 92, 93, 94, 95, 96, 97, 98, 99 or 100% sequence identity to SEQ ID NO: 8.

[0053] In a second example, the invasive recombinant bacterial cell of the invention comprises gene(s) encoding a first and second protein derived from a viral envelope glycoprotein complex, such as from HIV envelope glycoprotein complex proteins: gp120 and gp41 found in Human Immunodeficiency Virus 1 (HIV-1); in combination with and a third protein derived from a member of the 1.B.12.8.2 autotransporter-1 (at-1) family. These first, second and third proteins, that may be expressed as domains linked together in a fusion protein, confer on the cell the ability to act as a bacteria-mediated delivery vector for delivery of the therapeutic agent to a mammalian non-phagocytic immune cell. The recombinant bacterial cell may additionally express a fourth protein belonging to the 1.C.12.1.7 family of homologous proteins, preferably a cytolysin found in strains of Listeria monocytogenes, as described above in said first example, to ensure efficient intracellular delivery of bacterial therapeutics by phagolysosome lysis.

[0054] Suitable first and second proteins are gp120 and the gp41 ectodomain, derivable from the Transmitter/Founder (T/F) R5 strain BG505, that are modified by amino acid substitutions of all N glycosylation motifs (NXT/S), such that they are expressed as non-glycosylated proteins in the recombinant bacterial cell [Example 11]. When expressed as part of a fusion protein, the gp120 and gp41 protein domains may be connected by an amino acid linker. While not bound by theory, an envelope complex (e.g. spike protein trimer) comprising gp120 and gp41 proteins derived from (T/F) R5 strain BG505 will preferentially bind to a CD4 and a CCR5 receptor found on CD4+ CCR5+ T-cells. The gp41 ectodomain facilitates invasion by insertion of its hydrophobic N terminus into the immune cell membrane. Due to the affinity of the gp41 α-helices for both the bacterial- and immune-cell membranes, the respective membranes are pulled into sufficient juxtaposition to bring about their fusion.

[0055] The third protein, comprises protein domains derived from a member of the 1.B.12.8.2 family of homologous proteins, which facilitate anchoring of the gp120/gp41 envelope complex to the outer membrane of the recombinant bacterial cell. A suitable third protein may be derived from the signal peptide (SP) and the C-terminal portion of an autotransporter antigen 43 (FLU) protein from E. coli K12, the latter comprising an autochaperone (AC1) domain followed by a β-chain translocator domain.

[0056] When expressed as a fusion protein, the first and second gp120 and gp41 proteins are expressed as passenger domains fused between the SP and the AC1 domain of the third protein. The extended sequence of the SP ensures an export rate sufficient to sustain a secretion competent state of the passenger envelope complex. The C-terminal translocator domain anchors the fusion protein to the bacterial membrane by formation of a β-barrel outer membrane pore.

[0057] In one aspect, the amino acid sequence of said fusion protein (gp120+gp41) may be one having at least 70, 71, 73, 74, 75, 76, 77, 78, 79, 80, 81, 82, 83, 84, 85, 86, 87, 88, 89, 90, 91, 92, 93, 94, 95, 96, 97, 98, 99 or 100% sequence identity to SEQ ID NO: 10.

[0058] In one aspect, the invention provides a recombinant bacterial cell comprising recombinant genes encoding a fusion protein comprising an N-terminal signal peptide of an autotransporter antigen 43 (FLU) protein, an HIV-1 glycoprotein 120, a first linker peptide, an HIV-1 glycoprotein 41, and a second linker, an autochaperone (AC1) domain and a β-chain translocator domain of said autotransporter antigen, fused in consecutive order, such as provided in example 11.

[0059] In one embodiment, said N-terminal signal peptide of the autotransporter antigen 43 (FLU) protein may be encoded by a nucleic acid sequence having at least 70, 71, 73, 74, 75, 76, 77, 78, 79, 80, 81, 82, 83, 84, 85, 86, 87, 88, 89, 90, 91, 92, 93, 94, 95, 96, 97, 98, 99 or 100% sequence identity to SEQ ID NO: 171. In one embodiment, said N-terminal signal peptide of the autotransporter antigen 43 (FLU) protein may be having at least 70, 71, 73, 74, 75, 76, 77, 78, 79, 80, 81, 82, 83, 84, 85, 86, 87, 88, 89, 90, 91, 92, 93, 94, 95, 96, 97, 98, 99 or 100% sequence identity to SEQ ID NO: 288.

[0060] In one embodiment, said HIV-1 glycoprotein 120, said first linker peptide, and said HIV-1 glycoprotein 41 fused in consecutive order may have at least 70, 71, 73, 74, 75, 76, 77, 78, 79, 80, 81, 82, 83, 84, 85, 86, 87, 88, 89, 90, 91, 92, 93, 94, 95, 96, 97, 98, 99 or 100% sequence identity to SEQ ID NO: 286.

[0061] In one embodiment, said second linker may be derived from an autotransporter antigen 43 (FLU) protein from E. coli K12 having at least 70, 71, 73, 74, 75, 76, 77, 78, 79, 80, 81, 82, 83, 84, 85, 86, 87, 88, 89, 90, 91, 92, 93, 94, 95, 96, 97, 98, 99 or 100% sequence identity to SEQ ID NO: 179.

[0062] In one embodiment, said autochaperone (AC1) domain may be derived from an autotransporter antigen 43 (FLU) protein from E. coli K12 having at least 70, 71, 73, 74, 75, 76, 77, 78, 79, 80, 81, 82, 83, 84, 85, 86, 87, 88, 89, 90, 91, 92, 93, 94, 95, 96, 97, 98, 99 or 100% sequence identity to SEQ ID NO: 181.

[0063] In one embodiment, said β-chain translocator domain may be derived from an autotransporter antigen 43 (FLU) protein from E. coli K12 having at least 70, 71, 73, 74, 75, 76, 77, 78, 79, 80, 81, 82, 83, 84, 85, 86, 87, 88, 89, 90, 91, 92, 93, 94, 95, 96, 97, 98, 99 or 100% sequence identity to SEQ ID NO: 183.

[0064] In one embodiment, said second linker, autochaperone (AC1) domain and β-chain translocator domain fused in consecutive order may have at least 70, 71, 73, 74, 75, 76, 77, 78, 79, 80, 81, 82, 83, 84, 85, 86, 87, 88, 89, 90, 91, 92, 93, 94, 95, 96, 97, 98, 99 or 100% sequence identity to SEQ ID NO: 290.

[0065] In a preferred embodiment, the amino acid sequence of said fusion protein comprising an N-terminal signal peptide of an autotransporter antigen 43 (FLU) protein, an HIV-1 glycoprotein 120, a first linker peptide, an HIV-1 glycoprotein 41, and a second linker, an autochaperone (AC1) domain and a β-chain translocator domain of said autotransporter antigen may have at least 70, 71, 73, 74, 75, 76, 77, 78, 79, 80, 81, 82, 83, 84, 85, 86, 87, 88, 89, 90, 91, 92, 93, 94, 95, 96, 97, 98, 99 or 100% sequence identity to SEQ ID NO: 284. In one embodiment, said fusion protein is SEQ ID No.: 284.

[0066] In one embodiment, said recombinant genes encoding said fusion protein are located on a plasmid, such as pCOLA gp120-gp41-flu (SEQ ID NO 169).

[0067] In a third example, the invasive recombinant bacterial cell of the invention comprises genes encoding a first and second protein derived from components of the 1.C.36.3.1 Type III secretion system (T3SS), and membrane-anchoring protein(s), where the expression of said proteins confers the cell with the ability to act as a bacteria-mediated delivery vector for delivery of the therapeutic agent to a mammalian non-phagocytic immune cell.

[0068] Suitable first and second proteins are the invasin IpaB and IpaC proteins derivable from a pathogenic bacterium such as Shigella flexneri, together with a third protein, functioning as a membrane anchoring domain [Example 2]. While not bound by theory, IpaB initiates invasion, by forming a needle tip complex and binding to the host hyaluronan receptor CD44 and α5β1 integrin of an immune cell. IpaC, when complexed with ipaB, comprises domains for secretion; actin polymerisation at, and integration into, the immune cell membrane; resulting in internalization of the recombinant bacterial cell via filopodia and phagolysosome engulfment. IpaB further facilitates escape of the bacterium from the phagolysosomal by formation of ion pores. The third protein may either be invasin IpaD or alternatively a GPI-anchored protein such as a member of the bacterial ice nucleation family (e.g. INA-K and INA-Q) derivable from Pseudomonas spp that is fused to each of the IpaB and IpaC proteins. When the recombinant bacterial cell expresses each of IpaB and IpaC as fusion proteins, fused to the C-terminus of a truncated INA protein, its glucosylphosphatidylinositol (GPI) anchor domain tethers each fusion protein to the outer cell membrane, while the INA repeat region allows complex formation between the extracellularly displayed IpaB and IpaC.

[0069] In one aspect, the amino acid sequence of the fusion proteins INA.K-IpaB-IpaC may be one having at least 70, 71, 73, 74, 75, 76, 77, 78, 79, 80, 81, 82, 83, 84, 85, 86, 87, 88, 89, 90, 91, 92, 93, 94, 95, 96, 97, 98, 99 or 100% sequence identity to SEQ ID NO: 12.

[0070] In one aspect, the amino acid sequence of the proteins IpaB, IpaC and IpaD may be one having at least 70, 71, 73, 74, 75, 76, 77, 78, 79, 80, 81, 82, 83, 84, 85, 86, 87, 88, 89, 90, 91, 92, 93, 94, 95, 96, 97, 98, 99 or 100% sequence identity to SEQ ID NO: 14, 16, and 18 respectively.

[0071] In a further aspect, the invasive recombinant bacterial cell of the invention is additionally genetically adapted to undergo lysis following its released from the primary vesicle (e.g. phagosome) allowing release of its therapeutic payload. For example, the bacterial cell is modified to inactivate the chromosomal DapA gene, such that the cells undergo lysis in the immune cell due to a failure to express 4-Hydroxy-tetrahydrodipicolinate synthase (DAP), essential for cell wall synthesis (Example 1).

[0072] In a further aspect, the invasive recombinant bacterial cell of the invention is a live bacterium and a species of a genus selected from among Escherichia, Bacteroides, Akkermansia, Alistipes, Prevotella, Parabacteroides, Odoribacter, Enterobacter, Klebsiella, Citrobacter, Shigella, Listeria, Yersinia, Citrobacter, Bartonella, Agrobacterium, Salmonella, Helicobacter, Bartonella, Anaplasma, Ehrlichia, Coxiella, Chlamydia, Rickettisa, Legionella, Mycobacterium, Brucella, and Pseudobutyrivibrio. In a further embodiment, the invasive recombinant bacterial cell is selected from the genus Lactobacillus or Bifidobacterium. For example, the recombinant gram-negative bacterium is E. coli, since members of this species have the added advantage of being easily engineered, and in particular it is E. coli Nissle since this is a well-characterized probiotic that is classified as a risk group I organism.

[0073] In a further aspect, the invasive recombinant bacterial cell of the invention comprises on one or more plasmids that comprise the one or more recombinant nucleic acid molecules encoding the therapeutic agent. The coding sequence for the therapeutic agent in each of the one or more recombinant nucleic acid molecules is operatively linked to a promoter, RBS, signal peptide region, terminator, and polyadenylation signal functional in either a prokaryotic or a eukaryotic cell, these being selected to provide a desired expression level and location in the recombinant bacterium of the invention or in the invaded non-phagocytic immune cell respectively.

[0074] In a further aspect, the one or more recombinant nucleic acid molecules encoding a therapeutic agent additionally comprises at least one DNA nuclear targeting sequence(s) (DTS) to facilitate efficient import into the nucleus of the non-phagocytic immune cell, in particular into non-dividing immune cells. The inclusion of DTSs increases transcription rates of the one or more nucleic acid molecules transferred into an invaded non-phagocytic immune cell. The DTS(s) are present as multiple direct repeat sequences, preferably located before the promoter sequence and after the poly A signal of the therapeutic agent coding sequence. Recombinant bacterial cells of the invention, whose one or more recombinant nucleic acid molecules comprise DTSs selected from among an SV40 enhancer (SEQ ID No.: 19); a glucocorticoid receptor binding site (SEQ ID No.: 20); and a NF-κB-binding site (SEQ ID No.: 21), are illustrated in example 4. Relative levels of nuclear import and subsequent expression of the recombinant nucleic acid molecules comprising DTSs may be detected by measuring signal strength of a co-expressed fluorescent reporter gene and the number of fluorescent cells. Suitable DTSs and their optimal number of repeats are given in Table 1; further indicating their genetic sources.

| | Optimal | Nucleotide sequence |
|---|---|---|
| DTS derived from genes encoding: | No. repeats | of DTS |
| tumor suppressor protein p53 | 14× | TGCCTGGACTTGCCTGG |
| | | [SEQ ID No.: 22] |
| the activator protein 1 (AP-1) | 7× | TGACTAA [SEQ ID No.: |
| | | 23] |
| CCAAT-enhancer binding protein | 3× | ATTGCGCAAT |
| (C/EBP) | | [SEQ ID No.: 24] |
| consensus sites for cyclic AMP | 4× | AGCCTGACGTCAGAG |
| response element (CRE) | | [SEQ ID No.: 25] |
| retinoid X receptor response element | 5× | AGGTCAN |
| (DR1/RXRE) | | [SEQ ID No.: 26] |
| vitamin D receptor response element | 4× | AGGTCANNN |
| (DR3/VDR) | | [SEQ ID No.: 27] |
| active thyroid hormone receptor | 2× | CAGGAGGTCA |
| response element (DR4/TR) | | [SEQ ID No.: 28] |
| retinoic acid receptor response | 5× | AGGTCANNNNN |
| element (DR5/RARE) | | [SEQ ID No.: 29] |
| early growth response factor 1 | 3× | GGGGTGGGGN |
| (Egr-1) | | [SEQ ID No.: 30] |
| interferon γ-activated sequence (GAS) | 4× | AGTTTCATATTACTCTAAATC |
| | | [SEQ ID No.: 31] |
| glucocorticoid response element (GRE) | 4× | GGTACATTTTGTTCT |
| | | (Second repeat in |
| | | antisense) |
| | | [SEQ ID No.: 20] |
| interferon-stimulated response | 5× | TAGTTTCACTTTCCC |
| element (ISRE) | | [SEQ ID No.: 32] |
| LPS IL-1β response element (LILRE) | 4× | TCACTTCCTGAGAG |
| | | [SEQ ID No.: 33] |
| nuclear factor of activated T cells | 4× | GGAGGAAAAACTGTTTCATACA |
| (NFAT) | | GAAGGCGT [SEQ ID No.: |
| | | 34] |
| binding sites for nuclear factor κB | 5× | TGGGGACTTTCCGC |
| (NF-κB) | | [SEQ ID No.: 21] |
| serum response element (SRE) | 5× | AGGATGTCCATATTAGGACATC |
| | | T [SEQ ID No.: 35] |
| serum response factor (SRF) | 5× | GTCCATATTAGGAC |
| | | [SEQ ID No.: 36] |
| TGF-β/Activin response element (TARE) | 3× | CATTGTCAGTCTAGACATACTC |
| | | CGAGATTGTGGATTGAGA |
| | | [SEQ ID No.: 37] |
| SV40 (simian virus 40) ehancer | 2× | GGTGTGGAAAGTCCCCAGGCTC |
| | | CCCAGCAGGCAGAAGTATGCAA |
| | | AGCATGCATCTCAATTAGTCAG |
| | | CAACCA [SEQ ID No.: 19] |

[0075] In a further aspect, the therapeutic agent encoded by the one or more recombinant nucleic acid molecules is a therapeutic protein comprising nuclear localization sequences (NLS) fused to both the C- and N-terminal end of the therapeutic protein. Suitable NLS are given in Table 2; further indicating their genetic sources.

TABLE 2
Nuclear localization sequences (NLS)

| NLS derived from primary | |
|---|---|
| sequences of: | AA sequence |
| SV40 (simian virus 40) large T antigen | PKKKRKV [SEQ ID No.: 38] |
| c-Myc | PAAKRVKLD [SEQ ID No.: 39] |
| nucleoplasmin | KRPAATKKAGQAKKKK [SEQ ID No.: 40] |
| Human T-cell leukemia virus type-1 | MPKTRRRPRRSQRKRPPT |
| Rex protein (HTLV-1 Rex) | [SEQ ID No.: 41] |
| EGL-13 | MSRRRKANPTKLSENAKKLAKEVEN |
| | [SEQ ID No.: 42] |
| TUS-protein | KLKIKRPVK [SEQ ID No.: 43] |
| M9 domain of hnRNP A1 | NDFGNYNNQSSNFGPMKGGNFGGRSSGPY |
| | [SEQ ID No.: 44] |
| Epstein-Barr virus nuclear antigen 1 | KRPRSPSS [SEQ ID No.: 45] |
| (EBNA-1) | |
| Mitogen-activated protein kinase 1/3 | LDQLNHILGILGSPSQEDL [SEQ ID No.: |
| (ERK 1/2) | 46] |
| Nuclear factor of activated T-cells, | RSSRPASPCNKRKYS [SEQ ID No.: 47] |
| cytoplasmic 1 (NFATc1) | |
| Parathyroid hormone-related protein | RYLTQETNKVETYKEQPLKTPGKKKKGKP |
| (PTHrP) | [SEQ ID No.: 48] |

[0076] II. Therapeutic Payload of the Bacteria-Mediated Delivery Vector

[0077] The invasive recombinant bacterial cell of the invention comprises one or more recombinant nucleic acid molecule(s) encoding one or more therapeutic agent(s) for use in prevention and/or treatment of an immune-related disorder in a subject in need thereof, wherein said agent is one or more recombinant nucleic acid molecules (RNA or DNA), or one or more proteins, or a combination thereof. In one embodiment, a wide range of therapeutic agents can be delivered, e.g. a Chimeric Antigen Receptor protein; a small interfering RNA; a protein inhibitor of any one of T cell activation, T cell suppression, T cell proliferation and T cell cell death; a protein inducer of any one of T cell activation, T cell suppression, T cell proliferation and T cell cell death; a cytotoxin; a cytokine; a chemokine, and a CRISPR-Cas9; as is further illustrated below.

[0078] In another embodiment, the therapeutic agent is a recombinant or native DNA, RNA, or protein agent selected from the group: a Chimeric Antigen Receptor, a small interfering RNA, a protein inhibitor of any one of T cell activation; T cell suppression; T cell differentiation; T cell maturation; T cell proliferation and T cell cell death; a protein s inducer of any one of T cell activation; T cell suppression; T cell differentiation; T cell maturation; T cell proliferation and T cell cell death; an oxidoreductase or an inhibitor or an activator thereof; a transferase or an inhibitor or an activator thereof; a hydrolase or an inhibitor or an activator thereof; a lyase or an inhibitor or an activator thereof; an isomerase or an inhibitor or an activator thereof; a ligase or an inhibitor or an activator thereof; a translocase or an inhibitor or an activator thereof; a cytotoxin; a cytokine; a nanobody; a monobody; an affibody; an antibody fragment; a DARPin; a nanoparticle; a growth factor; a hormone; a chemokine, and; a CRISPR-Cas system.

[0079] II.i Nucleic Acid Therapeutic Agents:

[0080] In one aspect the therapeutic payload delivered by the recombinant bacterial cell of the invention to the non-phagocytic immune cell comprises one or more recombinant nucleic acid molecules. The therapeutic effect of the payload on the immune-related disorder is mediated by the expression of proteins encoded by said one or more recombinant nucleic acid molecules in the immune cell following delivery of the payload. Expression of the encoded proteins in the immune cell is facilitated by eukaryotic expression sequences (promoter, RBS, and polyadenylation signal) operatively linked to the protein coding sequences in the recombinant nucleic acid molecules.

[0081] A first example of a protein expressed in an immune cell on delivery of the payload is a Chimeric Antigen Receptor (CAR), which is designed to confer a T cell with the ability to recognize and bind to specific epitopes of a causal agent of a given disorder.

[0082] When the causal agent is an infectious disease, the CAR may comprise an antigen recognition domain (e.g. single-chain variable fragment; receptor domain) recognizing an epitope specific to the infectious agent, such that the resulting CAR-T cells have a therapeutic effect on an infectious disease (as exemplified in Table 3).

TABLE 3
Infectious diseases treated by bacteria-mediated
delivery vector payloads encoding CARs *

| | Epitopes | CAR antigen |
|---|---|---|
| | recognized | recognition |
| Infectious disease | by CAR | domain |
| Human | CD4 binding site on gp-120 | CD4 |
| Immunodeficiency | Env/gp120 glycans | CD4/CD28 |
| Virus (HIV) | V1/V2 glycan loop | PGT145-scFv |
| | CD4-induced epitope | CD8 |
| | on gp120/CD4 binding | |
| | site | |
| Hepatitis B Virus (HBV) | S HBV surface protein | C8-scFv |
| | HBV surface antigen | 19.79.6-scFv |
| Hepatitis C Virus (HCV) | E2 glycoprotein | e137-scFv |
| Cytomegalovirus (CMV) | Glycoprotein B | 27-287-scFv |
| | Virally encoded FcRs | IgG1 or IgG4 Fc |
| | | mutated |
| Aspergillus fumigatus | β-glucan | Dectin 1 |

* Seif, Einsele, & Löffler, (2019)

[0083] When the causal agent is cancer, the CAR may comprise an antigen recognition domain (e.g. single-chain variable fragment; receptor domain) recognizing an epitope specific for the cancer cell, such that the resulting CAR-T cells have a therapeutic effect on the cancer. The recognized epitope on a cancer cell includes surface receptors, and by way of example a receptor may be selected from among: CD19, BCMA, CD22, CD20, CD123, CD30, CD38, CD33, CD138, CD56, CD7, CLL-1, CD10, CD34, CS1, CD16, CD4, CD5, IL-1-RAP, ITGB7, k-IgG, TACI, TRBC1, MUC1, NKG2D, PD-L1, CD133, CD117, LeY, CD70, ROR1, AFP, AXL, CD80, CD86, DLL3, DR5, FAP, FBP, LMP1, MAGE-A1, MAGE-A4, MG7, MUC16, PMEL, ROR2, VEGFR2, CD171, CLD18, EphA2, ErbB, Fra, PSCa, cMet, IL13Ra2, EPCAM, EGFR, PSMA, EGFRcIII, GPC3, CEA, HER2, GD2 and Mesothelin (MacKay et al., 2020).

[0084] II.ii RNA Interference Mediated Therapeutics:

[0085] In one aspect the therapeutic effect of the payload delivered by the recombinant bacterial cell of the invention to the non-phagocytic immune cell is mediated by small interfering RNA (siRNA) encoded by short hairpin RNA (shRNA) coding sequences comprised in said one or more recombinant nucleic acid molecules. Transcription of the siRNA in the immune cell nucleus may be facilitated by eukaryotic expression sequences (promoter and polyadenylation signal, e.g. U6 promoter and a SV40 poly A termination signal) operatively linked to the shRNA coding sequences in the recombinant nucleic acid molecules [example 6]. Alternatively, the therapeutic payload comprises one or more siRNA molecules transcribed from the one or more recombinant nucleic acid molecules in the recombinant bacterial cell, whose transcription is facilitated by prokaryotic expression sequences (promoter, RBS, and terminator, e.g. T7 prokaryotic expression sequences) operatively linked to the shRNA coding sequences in the recombinant nucleic acid molecules [example 6]. On delivery to the immune cell cytoplasm, target messenger RNA (mRNA) complementary to the siRNA and detected by RNA-induced silencing complex (RISC) is then cleaved by a nuclease under direction of the RISC.

[0086] Disorders targeted by siRNA mediated therapy include silencing: inhibitors of T-cell activation in cancer; signaling pathways that activate T-cells in inflammation; genes required for viral invasion during HIV infection (Freeley & Long, 2013); CD4 in T-cells during autoimmune disease (Lee et al., 2012); ZAP-70 to reduce T-cell activation in delayed type hypersensitivity (Gust et al., 2008); SOCS3 to reduce allergic airway response in asthma and to reduce insulin resistance in diabetes (Jorgensen et al., 2013; Moriwaki et al., 2011); Cblb to improve efficacy of tumor vaccines in melanoma (Hinterleitner et al., 2012); JAK3 in CD3+ T-cell blasts to suppress Th1-mediated inflammatory responses (Gómez-Valadés et al., 2012); SOCS-1 in CD8 T-cells to improve anti-tumor response (Dudda et al., 2013); STAT3 to decrease graft-vs-host response and increase anti-tumor response in CD4 T-cells (Pallandre et al., 2007); CD4 to prohibit HIV entry into T-cells (Novina et al., 2002); CCR5 to prohibit HIV entry into T-cells (Kumar et al., 2008), NR4A2 to decrease inflammation in multiple sclerosis (Doi et al., 2008), FOXP3 or IL10 in CCR4+ Treg cells to inhibit breast cancer metastatis into the lung (Biragyn et al., 2013); T-bet in autoreactive encephalitogenic T-cells to inhibit development of multiple sclerosis (Lovett-Racke et al., 2004); GATA-3 in TH1 cells to enhance cancer vaccine response in colorectal cancer (Tesniere et al., 2010); and CD3 to treat acute allograft rejection and graft-vs-host disease.

[0087] II.iii Protein Therapeutic Agents:

[0088] In one aspect the therapeutic payload delivered by the recombinant bacterial cell of the invention to the non-phagocytic immune cell comprises one or more proteins. The proteins are encoded by the one or more recombinant nucleic acid molecules in the recombinant bacterial cell and expressed prior to their delivery to the immune cell. Expression of the encoded proteins in the bacterial cell is facilitated by prokaryotic expression sequences (promoter, RBS, signal peptide sequence, and terminator) operatively linked to the protein coding sequences in the recombinant nucleic acid molecules.

[0089] In one example, the protein is a transcription factor that mediates a therapeutic effect on an immune-related disorder by modulating cell differentiation, activation, or proliferation on delivery to a non-phagocytic immune cell (e.g. lymphocyte) associated with a given disorder.

[0090] In one example, the protein is an inhibitor of a transcription factor that is a causal agent of pro-inflammatory downstream signaling in diseases such as lupus, rheumatoid arthritis, and type 1 diabetes.

[0091] For instance, protein therapeutic agents delivered by the recombinant bacterial cells of the invention may be selected from among: Shigella virulence factors (Mattock & Blocker, 2017); OspC3 inhibiting Caspase-4-Mediated Inflammatory Cell Death; OspF inhibiting phosphorylation of ERK1/2 [Example 8]; OspG inhibiting NFκB activation; OspI inhibiting NFκB Activation; OspZ inhibiting NFκB activation; IpaH9.8, inhibiting NFκB response; IpaH0722 inhibiting NFκB activation; IpgD activating Akt/PI3K signaling pathway; Yersinia pestis effector YopH; a phosphotyrosine phosphatase that dephosphorylates phosphotyrosine and the T-cell scaffold proteins LAT and SLP-76, which inhibits TCR signaling and T-cell activation and proliferation (Wei et al., 2012); T3SS effectors NleE and NleB, where NleE inhibits NFκB through blockage of p65 nuclear transport upon TNFα and IL-1β stimulation and further suppresses NFkB by inhibiting activation of IKKβ and therefore degradation of IκB (Nadler et al., 2010), and NleB enhances NFkB inhibition of NleE and inhibits FAS death receptor mediated extrinsic apoptosis signaling, thereby protecting affected mammalian target cells from apoptotic cell death (Pollock et al., 2017) [Example 9].

[0092] Alternatively, the protein delivered to the non-phagocytic immune cell is selected from among adenosine deaminase (ADA) for the treatment of severe combined immunodeficiency (SCID) (Flinn & Gennery, 2018); L-asparaginase for the treatment of acute lymphoblastic leukemia (Müller & Boos, 1998) (see example 10); azurin in the treatment of cancerous lymphocytes (Punj et al., 2004); cytotoxins such as colibactin, glidobactin, and luminmide in the treatment of cancerous lymphocytes (R. Li et al., 2019); pro-inflammatory cytokines/chemokines in the treatment of immunodeficiency; and anti-inflammatory cytokines/chemokines in the treatment of inflammatory diseases (Luheshi, Rothwell, & Brough, 2009).

[0093] II.iv Combinations of Protein, DNA, and RNA Therapeutic Agents:

[0094] In one aspect the therapeutic payload delivered by the recombinant bacterial cell of the invention to the non-phagocytic immune cell comprises one or more Cas endonucleases and one or more guide RNA molecules (CRISPR Cas); e.g. Cas9 and single guide RNAs (gRNA), for use in the therapeutic prevention and/or treatment of an immune-related disorder. The CRISPR Cas is encoded by the one or more recombinant nucleic acid molecules in the recombinant bacterial cell and expressed prior to its delivery to the immune cell. Expression of the encoded CRISPR Cas in the bacterial cell is facilitated by prokaryotic expression sequences (promoter, RBS, and terminator) operatively linked to their respective coding sequences in the recombinant nucleic acid molecules. An N-terminal nuclear localization signal (e.g. SV40 NLS) may be fused to the Cas endonuclease (Cas9) to improve nuclear transport of the delivered protein. Alternatively, the recombinant nucleic acid molecules encoding both the Cas endonuclease and the gRNA are delivered to the invaded mammalian non-phagocytic immune cell where they are expressed under the control of mammalian expression sequences (promoter, enhancer, and poly A tail) operatively linked to their respective coding sequences in the recombinant nucleic acid molecules. An N-terminal DTS signal may be fused to the DNA sequences encoding the Cas nuclease and the gRNA to improve nuclear localization and enhanced expression.

[0095] CRISPR Cas, delivered as the therapeutic payload to non-phagocytic immune cells, may be used for prevention and/or treatment of HIV by directing gRNA to the following target sequences: HIV provirus LTR (U3 region (Ebina et al., 2013), HIV provirus LTR (R region) (Liao et al., 2015), HIV provirus second exon of Rev (Zhu et al., 2015), HIV provirus Gag/Pol/Rev/Env (Wang et al., 2016), T cell co-receptor CCR5 (Qi et al., 2018), and T cell co-receptor CXCR4 (Hou et al., 2015).

[0096] CRISPR Cas, as the therapeutic payload, may be used in the treatment of various types of cancer by directing gRNA to oncogenes in cancerous lymphocytes or to human programmed death-1 PD-1 receptor in T-cells to counteract PD-L1 expression and subsequent immune suppression by cancer cells (Su et al., 2016).

[0097] CRISPR Cas, as the therapeutic payload, may be used to target a mutated gene by additionally co-delivering a homologous replacement DNA sequence for restoring the non-mutant gene such as: targeting loss of function mutations in the Adenosine deaminase (ADA) ada gene in ADA deficiency (Flinn & Gennery, 2018), targeting mutations in the IL2RG gene in X-linked severe combined immunodeficiency (X-SCID) (Allenspach, Rawlings, & Scharenberg, 1993).

[0098] II.v Immune-Related Disorders:

[0099] Those disorders for which the invasive recombinant bacterial cells of the invention may be used as a bacteria-mediated delivery vector for use in providing therapeutic prevention and/or treatment include: autoimmune disorder(s); lymphoproliferative disorders; and cancer(s).

[0100] When the immune-related disorder is an autoimmune disorder it may be selected from the group: Inflammatory bowel disease; Celiac disease; Severe combined immunodeficiency (SCID); Organ transplant rejection (graft vs host disease); Asthma; Crohn's disease; Myocarditis; Postmyocardial infarction syndrome; Postpericardiotomy syndrome; Subacute bacterial endocarditis (SBE); Anti-Glomerular Basement Membrane nephritis; Lupus nephritis; Interstitial cystitis; Autoimmune hepatitis; Primary biliary cholangitis (PBC); Primary sclerosing cholangitis; Antisynthetase syndrome; Alopecia Areata; Autoimmune Angioedema; Autoimmune progesterone dermatitis; Autoimmune urticaria; Bullous pemphigoid; Cicatricial pemphigoid; Dermatitis herpetiformis; Discoid lupus erythematosus; Epidermolysis bullosa acquisita; Erythema nodosum; Gestational pemphigoid; Hidradenitis suppurativa; Lichen planus; Lichen sclerosus; Linear IgA disease (LAD); Morphea; Pemphigus vulgaris; Pityriasis lichenoides et varioliformis acuta; Mucha-Habermann disease; Psoriasis; Systemic scleroderma; Autoantibodies: Anti-nuclear antibodies, anti-centromere and anti-scl70/anti-topoisomerase antibodies; Vitiligo; Addison's disease; Autoimmune polyendocrine syndrome (APS) type 1; Autoimmune polyendocrine syndrome (APS) type 2; Autoantibodies: anti-21 hydroxylase; anti-17 hydroxylase.; Autoimmune polyendocrine syndrome (APS) type 3; Autoimmune pancreatitis; Diabetes mellitus type 1; Autoimmune thyroiditis; Ord's thyroiditis; Graves' disease; Autoimmune oophoritis; Endometriosis; Autoimmune orchitis; Sjögren syndrome; Autoimmune enteropathy; Coeliac disease; Crohn's disease; Esophageal achalasia; Ulcerative colitis; Antiphospholipid syndrome; Aplastic anemia; Autoimmune hemolytic anemia; Autoimmune lymphoproliferative syndrome; Autoimmune neutropenia; Autoimmune thrombocytopenic purpura; Cold agglutinin disease; Essential mixed cryoglobulinemia; Evans syndrome; Pernicious anemia; Pure red cell aplasia; Thrombocytopenia; Adiposis dolorosa; Adult-onset Still's disease; Ankylosing spondylitis; CREST syndrome; Drug-induced lupus; Enthesitis-related arthritis; A subtype of Juvenile Rheumatoid Arthritis.; Eosinophilic fasciitis; Felty syndrome; IgG4-related disease; Juvenile arthritis; Lyme disease; Mixed connective tissue disease; Palindromic rheumatism; Parry-Romberg syndrome; Parsonage-Turner syndrome; Psoriatic arthritis; Reactive arthritis; Relapsing polychondritis; Retroperitoneal fibrosis; Rheumatic fever; Rheumatoid arthritis; Sarcoidosis; Schnitzler syndrome; Systemic lupus erythematosus; Undifferentiated connective tissue disease; Dermatomyositis; Fibromyalgia; Inclusion body myositis; Myositis; Myasthenia gravis; Neuromyotonia; Paraneoplastic cerebellar degeneration; Polymyositis; Acute disseminated encephalomyelitis; Acute motor axonal neuropathy; Anti-N-Methyl-D-Aspartate Receptor Encephalitis; Balo concentric sclerosis; Bickerstaff's encephalitis; Chronic inflammatory demyelinating polyneuropathy; Guillain-Barre syndrome; Hashimoto's encephalopathy; Idiopathic inflammatory demyelinating diseases; Lambert-Eaton myasthenic syndrome; Multiple sclerosis; Oshtoran syndrome; Pediatric Autoimmune Neuropsychiatric Disorder Associated with Streptococcus; Progressive inflammatory neuropathy; Restless legs syndrome; Stiff-person syndrome; Sydenham's chorea; Transverse myelitis; Autoimmune retinopathy; Autoimmune uveitis; Cogan syndrome; Graves' ophthalmopathy; Intermediate uveitis; Ligneous conjunctivitis; Mooren's ulcer; Neuromyelitis optica; Opsoclonus myoclonus syndrome; Optic neuritis; Scleritis; Susac's syndrome; Sympathetic ophthalmia; Tolosa-Hunt syndrome; Autoimmune inner ear disease; Meniere's disease; Behçet's disease; Rare variant: Hughes-Stovin syndrome.; Eosinophilic granulomatosis with polyangiitis; Giant cell arteritis; Granulomatosis with polyangiitis; IgA vasculitis; Kawasaki disease; Leukocytoclastic vasculitis; Lupus vasculitis; Rheumatoid vasculitis; Microscopic polyangiitis; Polyarteritis nodosa; Polymyalgia rheumatica; Urticarial vasculitis; Vasculitis; Primary immunodeficiency; Chronic fatigue syndrome; Complex regional pain syndrome; Eosinophilic esophagitis; Gastritis; Interstitial lung disease; POEMS syndrome; Raynaud's phenomenon; Primary immunodeficiency; and Pyoderma gangrenosum. The autoimmune disorder may also be allergy.

[0101] When the immune-related disorder is cancer it may be selected from the group: Acute Lymphoblastic Leukemia; Acute Myeloid Leukemia; Adrenocortical Carcinoma; AIDS-Related Cancer; AIDS-Related Lymphoma; Lymphoma; Primary CNS Lymphoma; Anal Cancer; Gastrointestinal Carcinoid Tumor; Astrocytomas; Atypical Teratoid/Rhabdoid Tumor, Brain Cancer; Basal Cell Carcinoma; Bile Duct Cancer; Bladder Cancer; Bone Cancer; Ewing Sarcoma; Osteosarcoma; Malignant Fibrous Histiocytoma; Brain Tumors; Lung Cancer; Burkitt Lymphoma; Non-Hodgkin Lymphoma; Carcinoid Tumor; Cardiac Tumor, Medulloblastoma; CNS Embryonal Tumor, Primary CNS Lymphoma; Cervical Cancer; Cholangiocarcinoma; Chordoma; Leukemia; Lymphocytic Leukemia; Myeloid Leukemia; Myelogenous Leukemia; Myeloproliferative Neoplasm; Rectal Cancer; Craniopharyngioma; Cutaneous T-Cell Lymphoma; Mycosis Fungoides; Ductal Carcinoma In Situ; Endometrial Cancer; Uterine Cancer; Ependymoma; Esophageal Cancer; Esthesioneuroblastoma; Fallopian Tube Cancer; Gallbladder Cancer; Gastric Cancer; Gastrointestinal Carcinoid Tumor; Gastrointestinal Stromal Tumor; Gestational Trophoblastic Disease; Hepatocellular Cancer; Hodgkin Lymphoma; Hypopharyngeal Cancer; Intraocular Melanoma; Islet Cell Tumor, Pancreatic Neuroendocrine Tumor; Langerhans Cell Histiocytosis; Laryngeal Cancer; Lip and Oral Cavity Cancer; Liver Cancer; Lung Cancer, Pleuropulmonary Blastoma, Tracheobronchial Tumor; Lymphoma; Melanoma; Melanoma, Intraocular cancer; Merkel Cell Carcinoma; Mesothelioma, Metastatic Squamous Neck Cancer; Midline Tract Carcinoma With NUT Gene Changes; Mouth Cancer; Multiple Endocrine Neoplasia Syndromes; Multiple Myeloma; Myelodysplastic Syndromes, Myelodysplastic/Myeloproliferative Neoplasm; Myeloproliferative Neoplasm; Nasal Cavity cancer; Paranasal Sinus Cancer; Nasopharyngeal Cancer; Non-Hodgkin Lymphoma; Non-Small Cell Lung Cancer; Pleuropulmonary Blastoma; Oropharyngeal Cancer; Osteosarcoma; Ovarian Cancer; Pancreatic Cancer; Papillomatosis; Paraganglioma; Parathyroid Cancer; Penile Cancer; Pheochromocytoma; Pituitary Tumor; Plasma Cell Neoplasm; Breast Cancer; Lymphoma; Primary Central Nervous System Lymphoma; Peritoneal Cancer; Prostate Cancer; Recurrent Cancer; Renal Cell Cancer; Retinoblastoma; Rhabdomyosarcoma, Salivary Gland Cancer; Sarcoma; Skin Cancer; Small Intestine Cancer; Soft Tissue Sarcoma; Squamous Cell Carcinoma; T-Cell Lymphoma, Testicular Cancer; Thymoma and Thymic Carcinoma; Thyroid Cancer; Urethral Cancer; Uterine Cancer, Endometrial; Uterine Sarcoma; Vaginal Cancer; Vascular Tumors; Vulvar Cancer; Chondrosarcoma; Osteosarcoma; Rhabdomyosarcoma; Heart cancer; Astrocytoma; Brainstem glioma; Pilocytic astrocytoma; Ependymoma; Primitive neuroectodermal tumor; Cerebellar astrocytoma; Cerebral astrocytoma; Glioma; Medulloblastoma; Neuroblastoma; Oligodendroglioma; Pineal astrocytoma; Pituitary adenoma; Visual pathway and hypothalamic glioma; Invasive lobular carcinoma; Tubular carcinoma; Invasive cribriform carcinoma; Medullary carcinoma; Phyllodes tumor; Multiple endocrine neoplasia syndrome; Uveal melanoma; Appendix cancer; cholangiocarcinoma; Carcinoid tumor, gastrointestinal; Colon cancer; Extrahepatic bile duct cancer; Gastrointestinal stromal tumor; Hepatocellular cancer; Pancreatic cancer; Endometrial cancer; Renal cell carcinoma; transitional cell cancer; Gestational trophoblastic tumor; Wilms tumor; Oral cancer; Paranasal sinus and nasal cavity cancer; Pharyngeal cancer; Salivary gland cancer; Acute biphenotypic leukemia; Acute eosinophilic leukemia; Acute lymphoblastic leukemia; Acute myeloid leukemia; Acute myeloid dendritic cell leukemia; AIDS-related lymphoma; Anaplastic large cell lymphoma; Angioimmunoblastic T-cell lymphoma; B-cell prolymphocytic leukemia; Burkitt's lymphoma; Chronic lymphocytic leukemia; Chronic myelogenous leukemia; Cutaneous T-cell lymphoma; Diffuse large B-cell lymphoma; Follicular lymphoma; Hepatosplenic T-cell lymphoma; Hodgkin's lymphoma; Hairy cell leukemia; Intravascular large B-cell lymphoma; Large granular lymphocytic leukemia; Lymphoplasmacytic lymphoma; Lymphomatoid granulomatosis; Mantle cell lymphoma; Marginal zone B-cell lymphoma; Mast cell leukemia; Mediastinal large B cell lymphoma; Myelodysplastic syndromes; Mucosa-associated lymphoid tissue lymphoma; Mycosis fungoides; Nodal marginal zone B cell lymphoma; Precursor B lymphoblastic leukemia; Primary central nervous system lymphoma; Primary cutaneous follicular lymphoma; Primary cutaneous immunocytoma; Primary effusion lymphoma; Plasmablastic lymphoma; Splenic marginal zone lymphoma; T-cell prolymphocytic leukemia; Skin adnexal tumors; sebaceous carcinoma; Merkel cell carcinoma; Sarcomas of primary cutaneous origin; dermatofibrosarcoma protuberans; Bronchial adenoma and carcinoid; Mesothelioma; Pleuropulmonary blastoma; Kaposi sarcoma; Epithelioid hemangioendothelioma; Desmoplastic small round cell tumor; and Liposarcoma.

[0102] When the immune-related disorder is a lymphoproliferative disorder it may be selected from the group: post-transplant lymphoproliferative disorder; autoimmune lymphoproliferative syndrome; lymphoid interstitial pneumonia; Epstein-Barr virus-associated lymphoproliferative diseases; Waldenström's macroglobulinemia; Wiskott-Aldrich syndrome; Lymphocyte-variant hypereosinophilia; Pityriasis Lichenoides; and Castleman disease.

[0103] III Administration of the Bacteria-Mediated Delivery Vector Comprising a Therapeutic Payload

[0104] The recombinant bacterial cell of the invention for use in the prevention and/or treatment of an immune-related disorder in a subject in need thereof, is suitable for administration to the subject by a mode of administration selected from the group: intravenous, intra-arterial, intraperitoneal, intralymphatic, sub-cutaneous, intradermal, intramuscular, intraosseous infusion, intra-abdominal, oral, intratumor, intravascular, intravenous bolus; and intravenous drip.

[0105] Preferably the mode of administration is either intravenous, or intralymphatic, or intraperitoneal administration.

### EXAMPLES

[0106] General Methodology

[0107] Bacterial strains, plasmids, genes and cell lines used in the examples are identified in Table 4.

[0108] Escherichia coli strain TOP10 (Thermo Fischer Scientific) was used for DNA manipulations, plasmid propagations, and transfer experiments; while Escherichia coli Nissle 1917-pMUT1 (EcN), E. coli T7, or EcN Tn7::GFP, containing a chromosomally integrated GFP gene, were used for plasmid validations and transfer experiments. Bacterial strains were grown at 37° C. in Luria-Bertani (LB) broth or agar.

[0109] Jurkat clone E6-1 cells were maintained in Gibco™ RPMI 1640 Medium (ATCC modification, Fischer Scientific) supplemented with 10% Fetal Bovine Serum (FBS, RM10432, HiMedia Laboratories) and 1% Penicillin/Streptomycin/Neomycin (5,000 units penicillin, 5 mg streptomycin and 10 mg neomycin/ml, P4083, Sigma Aldrich) or 500× Mycozap Plus CL (Stemcell Technologies) at 37° C. and 5% CO₂. The PD-L1+ human breast cancer cell line MCF-7 was maintained in ATCC-formulated Eagle's Minimum Essential Medium (ATCC Catalog No. 30-2003) supplemented with 0.01 mg/ml human recombinant insulin, fetal bovine serum to a final concentration of 10%, and 1% Penicillin/Streptomycin/Neomycin (5,000 units penicillin, 5 mg streptomycin and 10 mg neomycin/ml, P4083, Sigma Aldrich) or 500× Mycozap Plus CL (Stemcell Technologies) at 37° C. and 5% CO₂. The CT26 murine colorectal carcinoma cell line (ATCC CRL-2638) was maintained in Dulbecco's modified Eagle's medium supplemented with 10% heat inactivated fetal bovine serum (FBS), and 1% Penicillin/Streptomycin/Neomycin (5,000 units penicillin, 5 mg streptomycin and 10 mg neomycin/ml, P4083, Sigma Aldrich) at 37° C. and 5% CO₂. The NF-κB Reporter Jurkat Cell line (Jurkat-Luc, BPS Bioscience) was maintained in Gibco™ RPMI 1640 Medium (ATCC modification, Fischer Scientific) supplemented with 10% Fetal Bovine Serum (FBS, RM10432, HiMedia Laboratories), 1 mg/ml of Geneticin, and 500× Mycozap Plus CL (Stemcell Technologies) at 37° C. and 5% CO₂

[0110] Primary human T cells and human PBMCs were maintained in ImmunoCult XF T cell Expansion medium (Stemcell technologies) supplemented with Human Recombinant IL-2 (Stemcell technologies) and 1% Penicillin/Streptomycin/Neomycin (5,000 units penicillin, 5 mg streptomycin and 10 mg neomycin/ml, P4083, Sigma Aldrich) or 500× Mycozap Plus CL (Stemcell Technologies) at 37° C. and 5% CO₂. Primary human T cells were activated with ImmunoCult™ Human CD3/CD28 T Cell Activator (Stemcell technologies).

[0111] Statistical Analysis

[0112] Quantified results were displayed as means of technical replicates±standard error of the mean (SEM), unless otherwise stated. Data sets with more than one grouping variable were assessed for statistical differences using a two-way ANOVA test with an appropriate test for multiple comparison of experimental groups, as stated in figure legends. For data sets with only one grouping variable a one-way ANOVA was used to determine significant differences. Results were considered significant with p-values below 0.05. All statistical analyses were performed using the Prism 9 software (GraphPad).

TABLE 4
Bacterial strains, plasmids, genes and cell lines of the examples

| Bacterial strain | | |
|---|---|---|
| names* | Genetic features | Source |
| E. coli TOP10 | F− mcrA Δ(mrr-hsdRMS-mcrBC) φ80lacZΔM15 ΔlacX74 recA1 | Thermo |
| | araD139 Δ(ara-leu)7697 galU galK λ− rpsL(StrR) endA1 nupG | Fischer |
| | | Scientific |
| EcN | Wild-type E. coli Nissle 1917 (EcN) | Ardeypharm |
| | | GmbH |
| EcN-MUT1 | E. coli Nissle 1917 (EcN) cured on native plasmid MUT1 | This study |
| EcN-MUT1 ΔdapA | E. coli stain EcN-MUT1 deleted for dapA gene (SEQ ID | This study |
| | No.: 247) | |
| EcN Tn7::GFP | E. coli Nissle 1917 (EcN) with chromosomally integrated GFP | this study |
| | gene (SEQ ID No.: 134) by insertion into the Tn7 gene. | |
| E. coli T7 | Chemically competent E. coli K12 derivative. F′ lac, pro, lacIq/ | New England |
| | Δ(ara-leu)7697 araD139 fhuA2 lacZ::T7 gene1 | Biolabs |
| | Δ(phoA)PvuII phoR ahpC* galE (or U) galK λatt::pNEB3-r1- | |
| | cDsbC (SpecR, lacIq) ΔtrxB rpsL150(StrR) Δgor Δ(malF)3 | |
| E. coli BM2710 | with chromosomal deletion of the dapA gene. thi-1, endA1, | Courvalin et |
| ΔdapA | hsdR17 (rk− mk+), supE44, Δ(lac)X74, ΔdapAΩcat, recA1 | al 1995 |

*Sequence for the Tn7::GFP (SEQ ID NO.: 246) can be found in the seqence list.
Sequence for dapA (SEQ ID NO.: 247) can be found in the sequence list.

| Plasmid/Vector | | |
|---|---|---|
| name ** | Genetic features | Source |
| pMUT1 | Native plasmid of E. coli Nissle 1917 | Genbank |
| (SEQ ID No.: 49) | | A84793.1 |
| pMB-dapA | Plasmid comprising nucleotide (nt) sequences of the | This study |
| (SEQ ID No.: 50) | J23119(SpeI) promoter (SEQ ID No.: 51); dapA gRNA target | |
| | (SEQ ID No.: 52); gRNA scaffold (SEQ ID No.: 53); spacer | |
| | (SEQ ID No.: 54); rrnB T1 terminator (SEQ ID No.: 55); | |
| | Bacterial terminator for E. coli rRNA rrnC (SEQ ID No.: 56); | |
| | cmR promoter (SEQ ID No.: 57) and cmR gene (SEQ ID | |
| | No.: 58); pHM 154 ori (SEQ ID No.: 60). | |
| pHM156 | Plasmid comprising nucleotide (nt) sequences of | This study |
| (SEQ ID No.: 61) | J23119(SpeI) promoter (SEQ ID No.: 51); CRISPR Cas9 gene | |
| | (SEQ ID No.: 62); FLAG (SEQ ID No.: 64); AmpR promoter | |
| | (SEQ ID No.: 65) and AmpR gene (SEQ ID No.: 66); pSC101 | |
| | ori (SEQ ID No.: 68); Rep101 (SEQ ID No.: 69); λ tL3 | |
| | terminator (SEQ ID No.: 70); rrnB T1 terminator (SEQ ID | |
| | No.: 55); spacer (SEQ ID No.: 54); gRNA scaffold (SEQ ID | |
| | No.: 53); lacI promoter (SEQ ID No.: 71); tetR gene (SEQ ID | |
| | No.: 72); arcA terminator (SEQ ID No.: 74); tonB terminator | |
| | (SEQ ID No.: 75); araC gene (SEQ ID No.: 76); araBAD | |
| | promoter (SEQ ID No.: 78); Gam gene (SEQ ID No.: 79); Beta | |
| | gene (SEQ ID No.: 81); Exo gene (SEQ ID No.: 83). | |
| pHM154 | Plasmid comprising nucleotide (nt) sequences of | This study |
| (SEQ ID No.: 85) | J23119(SpeI) promoter (SEQ ID No.: 51); gRNA spacer for | |
| | trpR (SEQ ID No.: 86); gRNA scaffold (SEQ ID No.: 53); spacer | |
| | (SEQ ID No.: 54); rrnB T1 terminator (SEQ ID No.: 55); cmR | |
| | promoter (SEQ ID No.: 57) and cmR gene (SEQ ID No.: 58); | |
| | ori (SEQ ID No.: 60). | |
| pZA11-MSC | Plasmid comprising BBa_J23100 promoter (SEQ ID | Andreas |
| (SEQ ID NO. 263) | NO.: 145); rrnB T1 terminator (SEQ ID No.: 55), p15A ori | Porse, DTU |
| | (SEQ ID No.: 95), lambda t0 terminator (SEQ ID NO.: 97), | |
| | AmpR (SEQ ID NO.: 66), AmpR promoter (SEQ ID NO.: 65) | |
| PL0017 | Plasmid comprising nucleotide (nt) sequences of CMV | Lund, A. M., |
| (SEQ ID NO. 122) | enhancer (SEQ ID No.: 123); CMV promoter (SEQ ID No.: | et al. 2014 |
| | 124); monomeric red fluorescent protein gene (mCherry) | |
| | (SEQ ID No.: 125); bGH poly(A) signal (SEQ ID No.: 127); | |
| | SV40 promoter (SEQ ID No.: 128); HygR gene (SEQ ID No.: | |
| | 129) encoding hygromycin resistance; SV40 poly(A) signal | |
| | (SEQ ID No.: 131); AmpR promoter (SEQ ID No.: 65); | |
| | AmpR gene (SEQ ID No.: 66); ori (SEQ ID No.: 60); lac | |
| | operator (SEQ ID NO.: 243); lac promoter (SEQ ID NO.: 244) | |
| pV3 | pV3 (pza11-invyp_hlyw491a) plasmid comprising nucleotide | This study |
| (SEQ ID No.: 87) | (nt) sequences of J23118 promoter (SEQ ID No.: 88); RBS | |
| | (5009.62 au) (SEQ ID No.: 89); Y. pseudotuberculosis invasin | |
| | (inv) (SEQ ID No.: 90); RBS (5966.49 au) (SEQ ID No.: 92); | |
| | L. monocytogenes listeriolysin O (hly) with a W491A | |
| | substitution (SEQ ID No.: 93); rrnB T1 terminator (SEQ ID | |
| | No.: 55); AmpR promoter (SEQ ID No.: 65) and AmpR gene | |
| | (SEQ ID No.: 66); λ tL3 terminator (SEQ ID No.: 70); p15A ori | |
| | (SEQ ID No.: 95). | |
| pSEVA27 | rrnB T1 terminator (SEQ ID No.: 55), pSC101ori (SEQ ID No.: | Silva-Rocha |
| (SEQ ID NO. 264) | 68), Rep101 (SEQ ID No.: 69), oriT (SEQ ID No.: 265), KanR | et al 2013 |
| | gene (SEQ ID No.: 104), lambda t0 terminator (SEQ ID | |
| | NO.: 97) | |
| pSQ11 | pSQ11_inv-hly plasmid comprising nucleotide (nt) sequences | This study |
| (SEQ ID NO.: 98) | of a pSC101ori (SEQ ID No.: 68); Rep101 origin (SEQ ID No.: | |
| | 69); a BamHI fragment of Y. pseudotuberculosis plasmid | |
| | pr1203 containing native inv expression cassette (SEQ ID No.: | |
| | 99) and Sau96I chromosomal fragment of Listeria | |
| | monocytogenes EGDe (NC_003210.1) containing the native | |
| | hly expression cassette (SEQ ID No.: 100); Mpl_Zinc | |
| | metalloproteinase precursor gene (SEQ ID No.: 101). rrnB T1 | |
| | terminator (SEQ ID No.: 55); λ t0 terminator (SEQ ID No.: 97); | |
| | Kan promoter (SEQ ID No.: 103); KanR gene (SEQ ID | |
| | No.: 104). | |
| pGB2Ωinv-hly | Plasmid comprising pSC101 ori (SEQ ID NO.: 68), Rep101 | This study |
| (SEQ ID NO.: 249) | (SEQ ID NO.: 69), aadA (SEQ ID NO. 250), Invasin | |
| | BZ22_RS15195 (SEQ ID NO. 252), listeriolysin precursor hlyA | |
| | (SEQ ID NO. 254), Imos06 (SEQ ID NO. 256), mpl (SEQ ID | |
| | NO. 257) | |
| pGB3 | Plasmid comprising Invasin BZ22_RS15195 (SEQ ID NO. 252), | This study |
| (SEQ ID NO.: 259) | listeriolysin precursor hlyA (SEQ ID NO. 254), Imos06 (SEQ ID | |
| | NO. 256), mpl (SEQ ID NO. 257), pSC101 ori (SEQ ID | |
| | NO.: 68), Rep101 (SEQ ID NO.: 69), lambda t0 terminator | |
| | (SEQ ID NO.: 97), AmpR (SEQ ID NO.: 66), AmpR promoter | |
| | (SEQ ID NO.: 65) | |
| pGB4 | Plasmid comprising Invasin BZ22_RS15195 (SEQ ID NO. 252), | This study |
| (SEQ ID NO.: 260) | listeriolysin precursor hlyA (SEQ ID NO. 254), Imos06 (SEQ ID | |
| | NO. 256), mpl (SEQ ID NO. 257), pSC101 ori (SEQ ID | |
| | NO.: 68), Rep101 (SEQ ID NO.: 69), lambda t0 terminator | |
| | (SEQ ID NO.: 97), AmpR (SEQ ID NO.: 66), OspF | |
| | phosphothreonine lyase (SEQ ID NO. 261), AmpR promoter | |
| | (SEQ ID NO.: 65) | |
| pCas9-gRNA-hPD1 | Plasmid comprising J23119(SpeI) promoter (SEQ ID | This study |
| (SEQ ID NO.: 197) | NO.: 51); gRNA for PDCD1 (SEQ ID NO.: 198); gRNA scaffold | |
| | (SEQ ID NO.: 53); rrnB T1 terminator (SEQ ID NO.: 55); | |
| | J23105 promoter (SEQ ID NO.: 199); 3xFLAG (SEQ ID | |
| | NO.: 200); SV40 NLS (SEQ ID NO.: 202); Cas9 (SEQ ID | |
| | NO.: 62); nucleoplasmin NLS (SEQ ID NO.: 204); ori (SEQ ID | |
| | NO.: 60); AmpR (SEQ ID NO.: 66); AmpR promoter (SEQ ID | |
| | NO.: 65). | |
| pCas9-GFP-gRNA- | Plasmid comprising U6 promoter (SEQ ID NO.: 185); gRNA | Addgene |
| hPD1 | for PDCD1 (SEQ ID NO.: 198); gRNA scaffold (SEQ ID | plasmid # |
| (SEQ ID NO.: 206) | NO.: 55); CMV enhancer (SEQ ID NO.: 123); chicken beta- | 48138 |
| | actin promoter (SEQ ID NO.: 207); hybrid intron (SEQ ID | |
| | NO.: 208); 3xFLAG (SEQ ID NO.: 200); SV40 NLS (SEQ ID | |
| | NO.: 202); Cas9 (SEQ ID NO.: 62); nucleoplasmin NLS (SEQ | |
| | ID NO.: 204); T2A (SEQ ID NO.: 209); EGFP (SEQ ID | |
| | NO.: 211); bGH poly(A) signal (SEQ ID NO.: 127); AAV2 ITR | |
| | (SEQ ID NO.: 213); f1 ori (SEQ ID NO.: 137); AmpR promoter | |
| | (SEQ ID NO.: 65); AmpR gene (SEQ ID NO.: 66); ori (SEQ ID | |
| | NO.: 60). | |
| pSpCas9(BB)-2A- | Plasmid comprising U6 promoter (SEQ ID NO.: 185); gRNA | Addgene |
| GFP | scaffold (SEQ ID NO.: 55); CMV enhancer (SEQ ID NO.: 123); | plasmid # |
| (SEQ ID NO.: 239) | chicken beta-actin promoter (SEQ ID NO.: 207); hybrid intron | 48138 |
| | (SEQ ID NO.: 208); 3xFLAG (SEQ ID NO.: 200); SV40 NLS | |
| | (SEQ ID NO.: 202); Cas9 (SEQ ID NO.: 62); nucleoplasmin | |
| | NLS (SEQ ID NO.: 204); T2A (SEQ ID NO.: 209); EGFP (SEQ | |
| | ID NO.: 211); bGH poly(A) signal (SEQ ID NO.: 127); AAV2 | |
| | ITR (SEQ ID NO.: 213); f1 ori (SEQ ID NO.: 137); AmpR | |
| | promoter (SEQ ID NO.: 65); AmpR gene (SEQ ID NO.: 66); ori | |
| | (SEQ ID NO.: 60). | |
| pNleBE | Plasmid comprising BBa_J23118 promoter (SEQ ID NO.: 88); | This study |
| (SEQ ID NO.: 214) | RBS3 (SEQ ID NO.: 215); nleB gene (SEQ ID NO.: 216); RBS4 | |
| | (SEQ ID NO.: 218); nleE gene (SEQ ID NO.: 219); rrnB T1 | |
| | terminator (SEQ ID NO.: 55); ori (SEQ ID NO.: 60); KanR (SEQ | |
| | ID NO.: 104); KanR promoter (SEQ ID NO.: 103). | |
| pUC57-ansB | Plasmid comprising BBa_J23100 promoter (SEQ ID NO.: 145); | This study |
| (SEQ ID NO.: 221) | RBS (98.3%) (SEQ ID NO.: 146); ansB gene (NCBI: | |
| | NP_415200.1) (SEQ ID NO.: 222); rrnB T1 terminator (SEQ | |
| | ID NO.: 55); ori (SEQ ID NO.: 60); AmpR (SEQ ID NO.: 66); | |
| | AmpR promoter (SEQ ID NO.: 65). | |
| pUC57-kan | Plasmid comprising lacZ-alpha (SEQ ID NO.: 241); lac | Genescript |
| (SEQ ID NO.: 240) | operator (SEQ ID NO.: 243); lac promoter (SEQ ID NO.: 244); | |
| | CAP binding site (SEQ ID NO.: 245); ori (SEQ ID NO.: 60); | |
| | KanR gene (SEQ ID NO.: 104); KanR promoter (SEQ ID | |
| | NO.: 103). | |
| psiRNA-CD3d | Plasmid comprising nucleotide (nt) sequences of T7 promoter | This study |
| (SEQ ID NO.: 193) | (SEQ ID No.: 155); shRNA CD3D (SEQ ID No.: 192); T7 | |
| | terminator (SEQ ID No.: 115); SV40 Poly(A) signal (SEQ ID | |
| | No.: 131); f1 ori (SEQ ID No.: 137); SV40 promoter (SEQ ID | |
| | No.: 128); PuroR gene (SEQ ID No.: 188); poly(A) signal (SEQ | |
| | ID No.: 190); AmpR promoter (SEQ ID No.: 65); AmpR gene | |
| | (SEQ ID No.: 66); ori (SEQ ID No.: 60); CMV enhancer(SEQ | |
| | ID No.: 123); CMV promoter (SEQ ID No.: 124); mCherry | |
| | gene (SEQ ID No.: 125). | |
| pCS6 | Plasmid comprising lambda t0 terminator (SEQ ID NO.: 97); | This study |
| (SEQ ID NO.: 234) | SmR (SEQ ID NO.: 235); SmR promoter (SEQ ID NO.: 237); | |
| | araC (SEQ ID NO.: 76); araBAD promoter (SEQ ID NO.: 78); | |
| | T7 RNA polymerase (SEQ ID NO.: 238); Rep101 (SEQ ID | |
| | NO.: 69); pSC101 ori (SEQ ID NO.: 68). | |
| pSO7 | Shigella flexneri phosphothreonine lyase OspF, Hygromycin | Lee et |
| (SEQ ID NO. 266) | resistance, Ampicillin resistance. | al 2018 |
| | Plasmid comprising nucleotide (nt) sequences of hygR (SEQ | |
| | ID NO.: 129), OspF phosphothreonine lyase (SEQ ID NO. | |
| | 261), ori (SEQ ID No.: 60), AmpR (SEQ ID NO.: 66), AmpR | |
| | promoter (SEQ ID NO.: 65). | |
| pZE3119-sfgfp | Plasmid comprising nucleotide (nt) sequences of J23119 | This study |
| (SEQ ID NO.: 116) | promoter (SEQ ID No.: 117); RBS (SEQ ID No.: 118); Super | |
| | folder GFP (SEQ ID No.: 119); rrnB T1 terminator (SEQ ID | |
| | No.: 55); Cat promoter (SEQ ID No.: 121); CmR gene (SEQ ID | |
| | No.: 58); λ t0 terminator (SEQ ID No.: 97); ori (SEQ ID No.: | |
| | 60). | |
| pCOLA-gp140 | Plasmid comprising nucleotide (nt) sequences of J23100 | This study |
| (SEQ ID NO.: 169) | promoter (SEQ ID No.: 145); RBS (SEQ ID No.: 170); Flu | |
| | signal peptide (SEQ ID No.: 171); GP120 gene (SEQ ID No.: | |
| | 172); 2xG5S (SEQ ID No.: 174); GP41 (Ectodomain) gene | |
| | (SEQ ID No.: 176); linker (Flu) (SEQ ID No.: 178); | |
| | Autochaperone (Flu) (SEQ ID No.: 180); β -barrel (Flu) (SEQ | |
| | ID No.: 182); rnnB T1 terminator (SEQ ID No.: 55); lacI | |
| | promoter (SEQ ID No.: 71); lacI gene (SEQ ID No.: 113); ColA | |
| | ori (SEQ ID No.: 114); AmpR promoter (SEQ ID No.: 65); | |
| | KanR gene (SEQ ID No.: 104). | |
| pGP140_Flu_hly | pCOLA-gp140 with insertion of Sau96I chromosomal | This study |
| plasmid | fragment of Listeria monocytogenes EGDe (NC_003210.1) | |
| | containing the native hly expression cassette (SEQ ID No.: | |
| | 100). | |
| pCOLA-ipaBC-inaK | Plasmid comprising nucleotide (nt) sequences of BBa_J23100 | This study |
| (SEQ ID NO.: 194) | promoter (SEQ ID No.: 145); inaK gene (SEQ ID No.: 195); | |
| | ipaB gene (SEQ ID No.: 14); ipaC gene (SEQ ID No.: 16); rrnB | |
| | T1 terminator (SEQ ID NO.: 55); lacI promoter (SEQ ID No.: | |
| | 71); lacI gene (SEQ ID No.: 113); ColA ori (SEQ ID No.: 114); | |
| | AmpR promoter (SEQ ID No.: 65); KanR gene (SEQ ID No.: | |
| | 104). | |
| pUC19 | Ampicillin resistance. | Thermo |
| (SEQ ID NO. 267) | lac promoter (SEQ ID NO.: 244); lac operator (SEQ ID | Fischer |
| | NO.: 243); lacZ-alpha (SEQ ID NO.: 241); AmpR gene (SEQ | Scientific |
| | ID No.: 66); AmpR promoter (SEQ ID No.: 65); ori (SEQ ID | |
| | No.: 60) | |
| pSW002-Pc- | Periplasmic expression of mTurquoise2 fluorescent protein, | Wilton et |
| TorA(sp)- | Tetracycline resistance, | al 2018 |
| mTurquoise2 | Plasmid comprising: pVS1 resolvase (SEQ ID NO.: 269), | |
| (SEQ ID No. 268) | pVS1 StaA (SEQ ID NO.: 271), pVS1 RepA (SEQ ID NO.: 272), | |
| | pVS1 oriV (SEQ ID NO.: 274), p15A ori (SEQ ID No.: 95), | |
| | mTurquoise (SEQ ID NO.: 275), tetR gene (SEQ ID No.: 72), | |
| | TcR (SEQ ID NO.: 275). | |
| pshRNA-scrambled | Scrambled shRNA(OSNEG20), Puromycin resistance, | Genecopoeia |
| (CSHCTR001-mU6 | Ampicillin resistance, mCherry fluorescent reporter gene. | |
| OSNEG20) | Plasmid comprising: SV40 Poly(A) signal (SEQ ID No.: 131); | |
| (SEQ ID NO. 279) | f1 ori (SEQ ID No.: 137); SV40 promoter (SEQ ID No.: 128); | |
| | PuroR gene (SEQ ID No.: 188); poly(A) signal (SEQ ID No.: | |
| | 190); AmpR promoter (SEQ ID No.: 65); AmpR gene (SEQ ID | |
| | No.: 66); ori (SEQ ID No.: 60); CMV enhancer(SEQ ID No.: | |
| | 123); CMV promoter (SEQ ID No.: 124); mCherry gene (SEQ | |
| | ID No.: 125); U6 promoter (SEQ ID NO.: 185), | |
| | shRNA(OSNEG20) (SEQ ID NO.: 280). | |
| pshRNA-CD3d-c | Targeting variant of shRNA against human CD3d transcript | Genecopoeia |
| (HSH02212-mU6- | variant 1 mRNA (NM_000732.4), Puromycin resistance, | |
| a-CD3D) | Ampicillin resistance, mCherry fluorescent reporter gene. | |
| (SEQ ID NO. 281) | Plasmid comprising: SV40 Poly(A) signal (SEQ ID No.: 131); | |
| | f1 ori (SEQ ID No.: 137); SV40 promoter (SEQ ID No.: 128); | |
| | PuroR gene (SEQ ID No.: 188); poly(A) signal (SEQ ID No.: | |
| | 190); AmpR promoter (SEQ ID No.: 65); AmpR gene (SEQ ID | |
| | No.: 66); ori (SEQ ID No.: 60); CMV enhancer(SEQ ID No.: | |
| | 123); CMV promoter (SEQ ID No.: 124); mCherry gene (SEQ | |
| | ID No.: 125); U6 promoter (SEQ ID NO.: 185 shRNA CD3D | |
| | (SEQ ID No.: 192). | |

** Plasmid maps are illustrated in FIG. 2

| Cell lines | Genetic features | Source |
|---|---|---|
| Jurkat clone E6-1 | Human actute T cell leukemia cell line that | ATCC TIB-152 |
| | overproduces IL-2 after stimulation. | |
| PBMC | Human peripheral blood mononuclear cells | Donor blood |
| CT26 | CT26 murine colorectal carcinoma cells | ATCC CRL-2638 |
| PD-L1⁺ MCF-7 | PD-L1⁺ human breast cancer | (Y. Zheng, Fang, |
| | cell line MCF-7 | & Li, 2019) |
| NF-κB Reporter | NF-κB Reporter T cell line | BPS Biosciences |
| (Luc) - Jurkat Cell | | (Catalog #: 60651) |
| line (Jurkat-Luc, | | |
| BPS Bioscience) | | |

### Example 1 Engineering Bacteria-Mediated Delivery Vectors Expressing Invasion and Listeriolysin O

[0113] The parent bacterial strain E. coli Nissle 1917 (EcN), cured of one of its two native plasmids to create strain (EcN-pMUT1), was used for engineering gene or protein delivery vectors as described below (method). The native pMUT1 plasmid was cured using CRISPR for future reintroduction of an engineered plasmid containing the invasive phenotype (Zainuddin, Bai, & Mansell, 2019). Expression of the invasive phenotype on a native plasmid allows for plasmid maintenance without the need for antibiotic resistance genes. A deletion strain, EcN-pMUT1 ΔdapA, characterized by auxotrophy for diaminopimelic acid (DAP) due to deletion of chromosomal copies of the dapA gene encoding 4-Hydroxy-tetrahydrodipicolinate synthase, was derived from EcN-pMUT1, into which one of the alternative inv-hly expression plasmids (Table 4) were introduced. The inv-hly genes encode Yersinia pseudo tuberculosis invasin and Listeria monocytogenes listeriolysin O proteins that together provide two component system for delivery of genes or proteins into a mammalian non-phagocytic immune cell. The resulting inv-hly strains were further transformed with various reporter plasmids for monitoring transfer of a gene payload.

[0114] Methods:

[0115] Deletion of dapA gene: The dapA gene in EcN-pMUT1 was deleted by a modified CRISPR-Cas9 λ-Red recombinase genome editing strategy (Reisch and Prather, (2015)) using the plasmids: pMB-dapA containing the dapA guide RNA; pHM156 containing CRISPR Cas9 for cutting dsDNA and λ Red homologous recombination system (Gam, Beta and Exo genes), and pHM154 a template gRNA plasmid containing a guide RNA spacer for trpR. pMB-dapA, the gRNA plasmid, was generated by overlap PCR amplification with primers amplifying pHM154, whilst excluding the gRNA spacer region, using overlaps matching the 3′ end of dapA (2841684 nt-2842562 nt in EcN chromosome). The resulting fragment was assembled into a plasmid via standard Gibson assembly to create pMB-dapA. A homologous DNA fragment, OE-dapA was created for replacement of dapA. First, primers amplified 500 bp upstream and 500 bp downstream of the dapA gene. The two resulting fragments were then combined via PCR using the forward and reverse primers of the upstream and downstream fragment, respectively.

[0116] The host cell, EcN, was then transformed with the CRISPR Cas9 and λ Red system plasmid pHM156. The λ Red recombinase was induced by incubation with L-arabinose at 30° C. and the cells were electroporated with the gRNA plasmid pMB-dapA and the homologous OE-dapA flanking region DNA fragment. The CRISPR Cas9 complex introduced a double stranded cut in the dapA gene via guidance of the gRNA. The chromosomal DNA cut was fatal to the bacterial cells unless the cut was repaired via homologous recombination with the supplied DNA fragment and subsequent replacement of the dapA gene, resulting in the creation of strain EcNΔdapA. Successful knockouts were confirmed by PCR amplification and plasmids pMB-dapA and pHM156 were cured via incubation with anhydrotetracycline hydrochloride (Sigma Aldrich) at 37° C.

[0117] Cloning “Invasion-Listeriolysin O” Expression Plasmids:
[0118] pV3 plasmid: a DNA fragment was synthesized comprising codon-optimized genes, inv and hly, encoding a Y. pseudotuberculosis invasin and a L. monocytogenes listeriolysin O harboring a W491A mutation respectively; wherein the genes were operably linked to constitutive promoter BBa_J23118 having a measured promoter strength of 0.56 (Anderson. C., 2006) and an optimized Ribosomal Binding Site (RBS) with a predicted strength of 5009 au and 5966 au for inv and hly, respectively (Salis H M., 2011; http://emopec.biosustain.dtu.dk/). This DNA fragment was cloned into plasmid pZA11-MCS to create plasmid pV3 (Table 4), by using Gibson assembly to combine it with a PCR amplified copy of the plasmid backbone using primers with homology arms to the DNA fragment.
[0119] pSQ11 plasmid: a DNA fragment comprising a native inv gene, encoding a Y. pseudotuberculosis invasin operably linked to a eukaryotic CMV promoter, was amplified using primers having a 40 bp homology arm to a pSEVA27 plasmid. A second DNA fragment comprising a native hly gene encoding listeriolysin O was amplified from the Listeria monocytogenes EGDe chromosome. The DNA fragment comprising the hly gene was assembled downstream of the inv gene and combined with the amplified backbone of plasmid pSEVA27 using Gibson assembly to create pSQ11 (Table 4).
[0120] pGB3: The TEM-1 gene of pUC19 was cloned into pGB2Ωinv-hly to replace the aadA gene
[0121] pGB4: The OspF gene of pS07 was cloned downstream of the TEM-1 promoter as a fusion to TEM-1 in pGB3.

[0122] Cloning Reporter Plasmids:
[0123] pZE3119-sfgfp plasmid: comprises a gene encoding a super folding GFP (sfGFP) under bacterial promoter cloned into a pZE plasmid backbone.
[0124] pPL0017 plasmid: comprises a gene encoding monomeric red fluorescent protein (mCherry) driven by PcMv promoter and gene encoding hygromycin resistance driven by SV40 promoter cloned into a pBASE vector (Lund et al., 2014).

[0125] Cloning Protein Transfer Reporter Plasmids and Vectors:

[0126] The only protein transfer reporter that was made was the pGB3 which is also an invasive plasmid and hence described above.

[0127] Transformation of E. coli strains: The respective “invasion-listeriolysin O” (inv-hly) expression plasmids were individually transformed into E. coli strain EcN-pMUT1 ΔdapA, E. coli TOP10, E. coli Nissle-pMUT1, E. coli Tn7::GFP, E. coli Nissle-pMUT1, or E. coli BM2710 ΔdapA together with a reporter plasmid (e.g. GFP reporter plasmid (pZE3119-sfgfp) or the mCherry reporter plasmid (pshRNA-CD3d-c (HSH02212-mU6-c-CD3D)) by electroporation to create the strains listed in Table 4.

[0128] Cell line culture conditions: Jurkat cells were maintained in Gibco™ RPMI 1640 Medium (ATCC modification, Fischer Scientific) supplemented with 10% Fetal Bovine Serum (FBS, RM10432, HiMedia Laboratories) and 1% Penicillin/Streptomycin/Neomycin (5000 units penicillin, 5 mg streptomycin and 10 mg neomycin/ml, P4083, Sigma Aldrich) or 500× MycoZap Plus-CL (Lonza Bioscience) at 37° C. and 5% CO₂. Primary human T cells and human PBMCs were maintained in ImmunoCult XF T cell Expansion medium (Stemcell technologies) supplemented with Human Recombinant IL-2 (Stemcell technologies) and 1% Penicillin/Streptomycin/Neomycin (5,000 units penicillin, 5 mg streptomycin and 10 mg neomycin/ml, P4083, Sigma Aldrich) or 500× Mycozap Plus CL (Stemcell Technologies) at 37° C. and 5% CO₂. Primary human T cells were activated with ImmunoCult™ Human CD3/CD28 T Cell Activator (Stemcell technologies).

### Example 2 Engineering Bacteria-Mediated Delivery Vectors Expressing ipaB and ipaC

[0129] E. coli strains (EcN-MUT1 ΔdapA) engineered to express ipaBC-inaK fusion proteins are capable of functioning as bacteria-mediated delivery vectors of genetic material to a target non-phagocytic immune cell.

[0130] Methods:

[0131] Cloning “ipaBC-inaK” Expression Plasmid:
[0132] pCOLA-ipaBC-inaK plasmid: contains a gene encoding fusion proteins comprising an C-terminally truncated inaK (derivable from Pseudomona syringae) fused at its C-terminus to ipaB fused to ipaC (derivable from Shigella sonnei). The truncated INP protein comprise a GPI-anchoring domain and repeat region that allows both membrane anchoring and sufficient flexibility for ipaB ipaC interactions during complex formation. The construct was introduced into an expression plasmid together with a synthetic promoter, RBS, and termination signal. This pCOLA-ipaBC-inaK plasmid was transformed into strain EcNΔdapA.

[0133] Primary human pan T cells were diluted to 2.67×10⁵ cells/ml in pre-warmed ImmunoCult XF T Cell Expansion medium supplemented with 25 ng/ml of IL-2 and added to a PLO coated 96 well plate at 150 μl per well. Overnight cultures of EcN, carrying either invasive plasmid pCOLA_ipaBC_inaK and the sfGFP reporter plasmid pZE3119 or no plasmid as a negative control, were labelled with the Incucyte® pHrodo® Red Cell Labelling Kit for Phagocytosis (Essen Biosciences), following the manufacturer's instructions. pHrodo Red labelled bacteria were diluted to an MOI of 2000 or 5.33×10⁸ cfu/ml in complete pre-warmed cell culture media and 150 μl were added to the T cell wells. As a positive control, 30 μl of labelled WT EcN were added, without cells, to separate wells containing 270 μl citrate-based buffer solution (pH<4.0). The plate was centrifuged for 10 minutes at 100×g to initiate contact between bacteria and placed into an IncucyteS3 instrument at 37° C. and 5% CO₂. Using the cell-by-cell imaging software module, wells were imaged on all channels at 20× magnification every 20 minutes for a total of 2 hours. The Incucyte analysis software was used to create single cell masks to identify T cells and total mean red, as well as green, fluorescence intensity object averages were determined for each image.

[0134] Results

[0135] As shown in FIG. 3a, intracellular bacteria could be detected inside infected cells, as indicated by bright red fluorescence entirely filling up cells without any GFP signal. In addition to increased red fluorescence, a lack of bacterial GFP signal from infected cells was indicative of phagolysosome localization of bacteria, due to lysis and denaturation of intracellular bacterial GFP signal in acidic pH.

[0136] On average, red fluorescence was highest for cells infected with invasive bacteria after 1 h and 50 min, compared to WT or uninfected cells. Whilst WT bacteria infected cells had a significantly higher total integrated red fluorescence per cell than uninfected cells, which indicated spontaneous uptake of the bacteria, invasive bacteria infected cells were significantly brighter than WT infected ones (FIG. 3b). Positive control bacteria, resuspended in acidic citrate buffer, exhibited red fluorescence values more than 10× higher than what was observed for infected cells. It was likely that this stark difference in fluorescence signal was due to the difference in pH conditions. Whilst citrate buffer had a pH of <4, the pH of the phagolysosome depends on the stage of maturation. From the initial formation of the phagosome, when pH values can range from 6.1-6.5, several fusion and fission events have to occur before the final phagolysosme has matured and contains pH conditions of below 5.5 (Uribe-Quero & Rosales, 2017). Hence, depending on the stage of maturation that the observed infected cells were in, red fluorescence intensities from the pH or dye could be drastically lower than the positive bacterial control in citrate buffer. Also, the ipaBC complex has been shown to be involved in phagosome escape in the native Shigella host (Croxen et al., 2013). In particular, ipaB has been described to form ion pores that lyse the phagosome (Yang, Hung, Aljuffali, & Fang, 2015). Hence, the large difference in red fluorescence values were likely due to bacterial escape from the phagosome during early stages of maturation. Whilst the WT bacteria were not capable of phagosome lysis, the low fluorescence values observed with these bacteria were contributed to the significantly lower rates of internalisation. In other words, cell populations infected with invasive bacteria might have had frequent events of cells with slightly increased red fluorescence while WT infected populations might have had very few events of cells with strongly increased red fluorescence. Because of this, both conditions might have resulted in similar levels of mean red fluorescence compared to positive control bacteria.

### Example 3 Recombinant Bacteria-Mediated Delivery Vectors Expressing Invasin and Listeriolysin O Invade T Cell Line and PBMCs

[0137] Engineered E. coli strains (EcN-MUT1 ΔdapA) containing one of the inv-hly expression plasmids (pV3 or pSQ11 (Example 1) and or a combination of the inv-hly plasmids pV3 or pSQ11 together with the reporter plasmid pZE3119-sfgfp (Example 1) were tested for their ability to infect Jurkat E6-1 cells and PBMCs, and thereby shown to function as bacteria-mediated delivery vectors of genetic material to a target non-phagocytic immune cell.

[0138] Methods:

[0139] Fluorescence microscopy analysis of invasion: Infection was performed in a flat-bottom 6-well plate, using 2.5×10⁵-1.2×10⁶ Jurkat E6-1 cells or PBMCs per well. The respective cells were infected with overnight cultures of E. coli EcN-pMUT1 strains comprising an inv-hly expression plasmid together with the reporter plasmid pZE3119-sfGFP or a control EcN-pMUT1 strain with only the reporter plasmid at multiplicity of infection (MOI) of either 400 or 2000 in RPMI media (see general methods) supplemented with 10% fetal bovine serum (FBS). Plates were centrifuged at 100×g for 10 min in a swinging bucket centrifuge, to initiate contact between cells of the E. coli strains and human cells, and incubated for 1 hour at 37° C. and 5% CO₂. Next, well contents were transferred to individual 15 ml falcon tubes and washed once with Phosphate Buffered Saline (Gibco™ PBS, pH 7.4 at room temperature, Fischer Scientific) at 300×g for 5 min at RT. A sterilized microscope glass cover slip was placed in the wells of a new 6-well plate and the washed cells, re-suspended in PBS, were slowly added onto the cover slip. The plates were incubated at RT for 30 minutes to allow for adherence of cells to the cover slip via gravity sedimentation (Chowdhury, S. et al, 2017). Upon adherence, PBS was carefully aspirated from the wells, and the wells were gently washed three times with PBS.

[0140] The cells, adhered to cover slips, were then fixed for 15 minutes at RT with Image-iT Fixative Solution (Thermo Fischer Scientific). After subsequently washing the cover slips in PBS, cellular antigens on the slides were blocked for 30 min at 37° C. at 5% CO₂ with stain buffer containing 2% fetal bovine serum (FBS) and 0.09% sodium azide (BD Biosciences).
[0141] Antigen detection: the fixed cover slips were incubated with primary antibodies diluted in stain buffer for 1 hr at RT or overnight at 4° C.; using primary antibodies to E. coli LPS (Thermo PA1-25636, Thermo Fischer Scientific) and CD49D integrins on human cells (Thermo 14-0499-82, Thermo Fischer Scientific). The primary antibody staining solution was then removed and the cover slips washed three times with PBS for 5 minutes. The cover slips were then incubated with secondary antibodies diluted in stain buffer for 1 hr at RT or overnight at 4° C.; using the secondary antibodies: ATTO 550 binding to anti-E. coli LPS antibody (Sigma 43328, Sigma Aldrich); Alexa Fluor 350 binding to anti-E. coli LPS antibody (A-11046, Thermo Fischer Scientific), and Brilliant Violet 480, binding to CD49D antibody (BD 746384, BD Biosciences). The secondary antibody staining solution was then removed and the cover slips washed three times with PBS for 5 minutes. For visualization of internalized E. coli cells, the infected immune cells were permeabilized with 0.5% Triton X-100 prior to incubation with the primary LPS antibody and the secondary anti-E. coli LPS antibody Alexa Fluor 350.
[0142] Nuclear staining: the fixed covers slips were incubated with DAPI Solution (1 mg 4′,6-diamidino-2-phenylindole/mL, 62248, Thermo Fischer Scientific) for 5 min at RT in the dark, followed by a PBS wash for 5 min.
[0143] Actin staining: the fixed covers slips were incubated with 0.5% Triton X-100 in distilled water for 15 min at RT to permeabilize infected immune cells; washed twice with PBS. Two drops of rhodamine phalloidin (ActinRed™ 555 ReadyProbes from Thermo Fischer Scientific) were then added to the cover slips and incubated for 30 minutes at RT in the dark and finally washed twice with PBS.
[0144] Mounting: 25 μl of Vectashield hardmount solution (H-1400, Vector Laboratories) were added onto a microscope slide. The cover slips were carefully placed onto the microscope slide, cell side facing the mounting solution, and left to cure for 15 minutes at RT. Prepared microscope slides were imaged on a fluorescence microscope using a 60× magnification.

[0145] Incucyte Live Cell Imaging Analysis of Invasion

[0146] Jurkat E6-1 cells were diluted to 3×10⁵ cells/ml in pre-warmed RPMI+10% FCS and added to a 96 well plate at 100 μl per well. An overnight cultures of EcN Tn7::GFP containing either the invasive plasmid were diluted in complete cell culture media to MOIs ranging from 80-1280 or 2.4×10⁷-3.8×10⁸ cfu/ml. 100 μl of diluted bacteria were added to Jurkat cells and plates were centrifuged at 100×g for 30 sec to initiate contact between bacteria. Plates were incubated for 2 hours at 37° C. and 5% CO₂. To terminate infections, cell suspensions were transferred to a 96-well V-bottom plate and centrifuged for 5 minutes at 200×g. Pellets were gently washed once with 100 μl complete cell culture medium. Cells were resuspended in 200 μl of RPMI+10% FCS+50 μg/ml Gentamicin and transferred to a new PLO coated 96-well F-bottom plates and left stationary to settle at RT for 20 minutes. The plate was then transferred to an IncucyteS3 instrument at 37° C. and 5% CO₂. Using the cell-by-cell imaging software module, wells were imaged on all channels at 20× magnification every 20 minutes for a total of 4 days. The Incucyte analysis software was used to create single cell masks to identify T cells and total mean red, as well as green, fluorescence intensity object averages were determined for each image.

[0147] Results:

[0148] Jurkat E6-1 cells were infected with GFP expressing EcN-Tn7::GFP containing the invasive plasmid pV3, encoding codon-optimsed versions of the native inv-hly genes as well as containing a cytotoxicity reducing mutation in hly. Infected cells were then visualized in the Incucyte to determine green and red fluorescence. Cells exhibiting both green and red fluorescence were excluded from analysis as autofluorescent dying cells. Only cells that exclusively exhibited green fluorescence were determined to contain intracellular bacteria where green fluorescence stemmed from bacterially produced GFP and not cellular autofluorescence. As shown in FIG. 4a, several cells could be observed to contain increasing amounts of GFP expressing bacteria over time. At an MOI of 160, it was possible to observe one cell that burst and release a large amount of intracellular bacteria, indicative of active intracellular bacterial replication. Quantification of invaded cells in FIG. 4b showed that a maximum of around 25% of cells were invaded with bacteria and that this maximum was reached in a concentration dependent manner. Whilst the highest MOI of 1280 reached the maximum after around 10 hours post infection, an MOI of 320 only reached the maximum after around 16 hours. MOIs below 320 only achieved low invasion rates below 5%.

[0149] The invasive properties of the engineered E. coli EcN strains expressing the two component delivery system encoded by the Yersinia pseudotuberculosis invasin gene and the Listeria monocytogenes listeriolysin O system (inv-hly) and the reporter gene GFP, in T-cells (Jurkat E6-1) and human PBMCs infected with these strains was detected by immunofluorescence microscopy. All E. coli cells of the engineered EcN strains were identifiable and localizable by virtue of their expression of GFP and its detectable fluorescence. Those E. coli cells that remain external to the infected T-cells of PBMB cells (target cells) were detected by the combination of the primary E. coli LPS antibody and secondary anti-E. coli LPS antibody (ATTO 550) that detect E. coli surface antigens, since the antibodies are too large to enter the target cells and therefore intracellular bacteria. Subsequent detergent permeabilization of the target cells allowed detection of E. coli cells internalized within the target cells, using a combination of the primary E. coli LPS antibody and secondary anti-E. coli LPS antibody (ATTO 350). The target cells were detected and localized using anti-CD49D antibody that binds to integrin α4β1 on the mammalian cell surface. DNA staining with DAPI allows detection of the nucleus in both E. coli and target cells and their respective localization.

[0150] The target T-cells and PBMCs were infected with E. coli strains expressing two variants of the inv-hly two component delivery system encoded by genes on the plasmids pV3 and pSQ11 (Table 4). The invasin and Listeriolysin O encoded by the plasmids differed in respect to codon optimization of the expressed genes; the promoter strength and the substitution of E. coli signal peptides for the respective native signal peptide.

[0151] Infection of T-cells (Jurkat E6-1) (FIG. 5a&c) and PBMCs (FIG. 5b) with the engineered EcN strains expressing the two component delivery system (inv-hly) encoded by each of the three plasmids resulted in successful invasion, since several internalized E. coli cells were detected of these target cells. In contrast only a single invasion event was observed with the WT EcN strain in T-cells (see FIG. 5a, top row). The invaded PBMCs detected in FIG. 5b were presumed to be lymphocytes in view of the morphology of their DAPI stained nucleus; and the relative abundance of lymphocytes (T cells, B cells, NK cells) amongst human PBMCs, that is typically 70-90%. In some cases, intracellular bacteria were observed to be contained in phagolysosome-like compartments whilst others were not, indicating that expression of the Listeriolysin O by the invading E. coli cells successfully mediates phagolysosome escape.

[0152] When actin was detected in T-cells (Jurkat E6-1), infected with E. coli cells of the engineered EcN strain expressing the two component delivery system (inv-hly), actin polymerization was observed along points of contact with the internalized bacteria (FIG. 5c); indicating that the observed invasion may be mediated by an actin-dependent mechanism. This property was not seen for T-cells infected with the WT E. coli strain.

### Example 4 Use of Recombinant Bacteria-Mediated Delivery Vectors Expressing Invasin and Listeriolysin O to Transfer Genes into a T Cell Line

[0153] E. coli BM2710, containing a combination of the inv-hly expression plasmid pGB2Ωinv-hly and the mCherry reporter plasmid pshRNA-CD3d-c, was used to infect Jurkat E6-1 cells. Strong and persistent plasmid expression was shown in several infected cells and thereby the data demonstrated the use of bacteria-mediated delivery vectors of the invention for transfer and expression of genetic material to a target non-phagocytic immune cell.

[0154] Methods:

[0155] Jurkat E6-1 were diluted to 1×10⁵ cells/ml in 6.5 ml of PBS and stained with 65 μl of the cytoplasmic labelling dye Incucyte® Cytolight Rapid Green (Essen Bioscience) for 20 minutes at 37° C., according to the manufacturer's instructions. Excess dye was diluted by addition of 40 ml RPMI+10% FCS and cell suspensions were centrifuged at 300×g for 7 minutes. Cell pellets were resuspended in complete culture medium supplemented with diaminopimelic acid (DAP) at a final concentration of 100 μg/ml. 500 μl of labelled cells were added to a 12 well plate at a density of 4×10⁵ cells/ml. An overnight culture of E. coli BM2710 containing the invasive plasmid pGB2Ωinv-hly and the reporter plasmid pshRNA-CD3d-c was diluted to an MOI of 640 or 2.6×10⁸ cfu/ml in complete culture medium supplemented with 10 mg/ml 2,6-Diaminopimelic acid (Sigma Aldrich) and 500 μl of bacterial suspension were added to the wells. Bacteria containing only the invasive plasmid but not the reporter plasmid served as a negative control. Co-cultures were incubated for 2 hours at 37° C. and 5% CO₂. To terminate infections, well contents were pelleted, resuspended in complete cell culture medium supplemented with 50 ug/ml Gentamicin, and transferred to new PLO coated 12 well plates. The plates were transferred to an IncucyteS3 instrument and incubated at 37° C. and 5% CO₂. Using the cell-by-cell imaging software module, wells were imaged on all channels at 20× magnification every 2 hours for a total of 70 hours. The Incucyte analysis software was used to create single cell masks to identify T cells and total mean red, as well as green, fluorescence intensity object averages were determined for each image. Images that were taken after plate disturbances, due to e.g.: movement of the instrument sample tray, or that contained misidentified cells were excluded from quantitative analysis.

[0156] Results:

[0157] FIG. 6a follows the faith of an infected cell over time. The cell slowly started to exhibit mCherry expression 10 hours post infection followed by a rapid increase in fluorescence at 18 hours post infection. The live cell dye Cytolight Rapid Green was furthermore used to confirm cell health. The image at 18 hours post infection provides a clear example of two cells with identical healthy cellular morphology and bright staining with the live cell dye but only one cell showing expression of the mCherry reporter. Quantification of average live and red cell numbers per image over time is shown in FIG. 6b. Numbers of live and red cells were significantly higher for cells infected with invasive bacteria carrying the shRNA plasmid when compared to the negative controls of uninfected or invasive bacteria infected cells. mCherry expressing cells could be quantified for more than 70 hours post infection. In addition to providing evidence for a prove of concept for DNA delivery in form of the mCherry protein expression, this experiment also demonstrated the functional delivery of the therapeutic anti CD3d shRNA which was contained on the same delivered plasmid as a fusion to mCherry.

### Example 5 Recombinant Bacteria-Mediated Delivery Vectors (Inv-Hly) to Transfer Proteins into T-Cells

[0158] E. coli Nissle-pMUT1 containing the inv-hly expression plasmid pV3, encoding a b-lactamase enzyme, was used to infect Jurkat E6-1 cells, to demonstrate the use of the engineered E. coli to transfer of a reporter protein to an infected T-cell.

[0159] Methods:

[0160] Jurkat E6-1 cells were diluted to 2.2×10⁶ cells/ml in pre-warmed RPMI+10% FCS at 5 ml per flask. Overnight cultures of EcN+pV3 were diluted in complete cell culture medium at MOIs ranging from 640-1280 or 1.4×10⁹-2.8×10⁹ cfu/ml. WT EcN infected cells or uninfected cells served as negative controls for protein transfer. 5 ml of bacterial dilutions were added to the cells and culture flasks were incubated for 2 hours at 37° C. and 5% CO₂. To terminate cell infections, flask contents were transferred to 50 ml falcon tubes (Corning) and washed once with PBS. Washed cell pellets were resuspended in complete culture medium containing 50 μg/ml Gentamicin and transferred to new 50 ml suspension culture flasks. Cell cultures were incubated for 2-24 hours at 37° C. and 5% CO₂. In order to detect β-lactamase protein transfer, cultured cells were labelled with the LiveBLAzer™ FRET-B/G Loading Kit with CCF4-AM (Thermo Fischer Scientific), following the manufacturer's instructions. A modified Jurkat optimized loading protocol was used, after correspondence with Thermo Fischer Scientific. Specifically, a sort buffer consisting of Calcium- and Magnesium-free PBS, 1% glucose, 1 mM EDTA, and 1 mM HEPES was used instead of solution C from the LiveBLAzer kit. Labelled Jurkat cells were centrifuged to remove supernatants and resuspended in 1 ml of sort buffer for immediate flow cytometry analysis. Prepared cell suspensions were analysed on a Sony SH800S FACS.

[0161] Results:

[0162] As seen in FIG. 7a, FSC vs SSC populations were highly similar between infected and uninfected cells, which was indicative of healthy cell morphologies. Blue fluorescence of cleaved CCF4-AM was detected in 0.19% and 0.20% of cells infected with EcN pV3 at MOIs of 640 and 1280, respectively, which demonstrated successful protein transfer to T cells FIG. 7b. These results showed for the first time that functional protein could be delivered to non-phagocytic human immune cells using invasive bacterial delivery vectors.

### Example 6 Use of a Recombinant Bacteria-Mediated Delivery Vector (Inv-Hly) to Mediate Delivery and Translation of CD3d siRNA to T-Cells

[0163] Engineered E. coli strains (EcNΔdapA) containing the inv-hly expression plasmid (pGB2) and a vector comprising a recombinant nucleic acid molecule encoding an siRNA for silencing CD3d expression are used to infect T-cells (e.g. Jurkat) in vitro. CD3d siRNA translation in the infected cells serves to demonstrate that the engineered E. coli of the invention can be used for both transfer and functional translation of CD3d siRNA in mammalian T-cells. Such T cells, silenced in their CD3d expression by the delivered siRNA, confer a therapeutic effect in mouse models exhibiting TNP-KLH induced colitis, experimental allergic encephalomyelitis (EAE), and collagen-induced arthritis.

[0164] Methods

[0165] Plasmid construction: Plasmid pshRNA-CD3d (HSH022212-mU6-a-CD3D, Genecopoeia), is a non-viral shRNA expression vector for expression in mammalian cells that encodes a siRNA against human CD3d under the mammalian U6 promoter and SV40 poly A termination signal. Plasmid psiRNA-CD3d that allows transcription of the siRNA gene in a bacterial cell, was derived from pshRNA-CD3d by replacing its mammalian U6 promoter with a T7 promoter and inserting a T7 terminator downstream of the siRNA coding sequence. Plasmid pCS6 encoded a T7 RNA polymerase under control of an L-arabinose-inducible bacterial araBAD promoter (Addgene plasmid #55752).

[0166] Cells of E. coli strain EcNΔdapA were transformed with the plasmids: pshRNA-CD3d; psiRNA-CD3d; pCS6; or CSHCTR001-mU6, in combination with the inv-hly expression plasmid pGB2 (Table 4).

[0167] In vitro RNA transfer of siRNA: Jurkat E6-1 cells were infected in 6-well plates with EcNΔdapA strains comprising plasmids: pGB2, pCS6 and psiRNA-CD3d; or pGB2 and psiRNA-CD3d as a first negative control; or pGB2 alone as a second negative control, at a range of different MOIs, as described for in vitro DNA transfer. As a positive control, Jurkat cells were electroporated with anti-CD3d siRNA and incubated without bacteria. After infection, cells were labelled with anti-CD3d antibody and DAPI nuclear stain and analysed for CD3d silencing on both a flow cytometer and a fluorescent microscope.

[0168] In vivo transfer of siRNA: In vivo bacterial transfer of anti-CD3d siRNA into T cells was performed on members of mouse models having TNP-KLH induced colitis or EAE, or collagen-induced arthritis as previously described (Kuhn & Weiner, 2016). Members of each mouse model were injected i.v. with overnight cultures of invasive EcNΔdapA (pGB2) strains in PBS comprising the anti-CD3d siRNA plasmids (psiRNA-CD3d and pCS6); or invasive EcNΔdapA (pGB2) strains without siRNA plasmids as negative controls, or a commercial anti-CD3 antibody as a positive control. Treated mice were analysed for disease model specific markers as follows: for members of the TNP-KLH induced colitis model by daily tail vein and end point blood puncture blood samples to determine bacterial load, cytokine levels, and CD3 expression on target T cells via flow cytometry, histopathological evaluation of inflamed tissues, survival, and immunohistochemistry; for members of the EAE mouse model be daily tail vein and end point blood puncture blood samples to determine bacterial load, cytokine levels, and CD3 expression on target T cells via flow cytometry, measurement of pro-inflammatory cytokines in end point samples of brain tissue and spinal cord fluid, and survival; and for members of the collagen-induced arthritis mouse model by daily tail vein and end point blood puncture blood samples to determine bacterial load, cytokine levels, C-reactive protein (CRP), and CD3 expression on target T cells via flow cytometry, measurement of paw volume or thickness over time, and erythrocyte sedimentation rate.

### Example 7 Use of a Recombinant Bacteria-Mediated Delivery Vector (Inv-Hly) to Mediate Delivery and Expression of CRISPR/gRNA for Targeting Human Programmed Death-1 PD-1 Receptor in T-Cells

[0169] Engineered E. coli strains (EcNΔdapA) containing the inv-hly expression plasmid (pGB2) and a vector comprising a recombinant nucleic acid molecule encoding Cas9 and a gRNA sequence are used to infect T cells and target and knock-out the human PD-1 receptor (hPDCD1) gene on chromosome 2 Exon2, in vitro and in vivo. Knockout of hPD1 expression in the infected T cells serves to demonstrate that the engineered E. coli of the invention can be used for both transfer and functional expression of Cas9-gRNA-hPD1 in mammalian T-cells. Such T cells, modified to express Cas9-gRNA-hPD1, will confer a therapeutic effect on colorectal carcinomas in mice.

[0170] Methods

[0171] Plasmid construction: Plasmid pCas9-gRNA-hPD1, synthesised and cloned in a pUC57 backbone (Genscript), encodes a Cas9 endonuclease flanked by a SV40 Nuclear Localization Sequence (NLS) and a nucleoplasmin NLS and is operably linked to the bacterial J23105 promoter. The NLS increases the efficiency of nuclear localisation of the endonuclease protein and subsequent genome editing. The plasmid also encodes a gRNA sequence that targets the human PD-1 receptor (hPDCD1) on chromosome 2 Exon2 with the PAM sequence GGG. The gRNA is operably linked to the bacterial J23119 promoter which was modified to end with a SpeI site (Registry of Standard Biological Parts BBa_J23119). The plasmid was transformed into EcNΔdapA together with the inv-hly expression plasmid pGB2 (Table 4). As a positive control for bacterial transfer experiments, the gRNA from pCas9-gRNA-hPD1 was cloned into the gRNA backbone of plasmid pSpCas9(BB)-2A-GFP (Addgene plasmid #48138), which contains a Cas9 operably linked to a mammalian CMV promoter and enhancer control, a C-terminal fusion to EGFP, and a gRNA scaffold operably linked to a mammalian U6 promoter control, via Gibson assembly to create pCas9-GFP-gRNA-hPD1 [SEQ ID No.: 197].

[0172] In vitro CRISPR knockout of hPDCD1: Freshly isolated, primary, human T cells were activated with ImmunoCult™ Human CD3/CD28 T Cell Activator (Stemcell technologies) according to the supplier's instructions. In short, 10\hat{ }6 cells were seeded into freshly prepared ImmunoCult™-XF T Cell Expansion Medium (Stemcell technologies) containing Human Recombinant IL-2 (Stemcell technologies) and activated for 3 days at 37° C. and 5% CO₂ with ImmunoCult™ Human CD3/CD28 T Cell Activator antibodies.

[0173] Bacterial transfer of the above plasmids was performed in a flat-bottom 6-well plate, seeded with 1.2×10⁶ activated primary T cells per well. Cells were infected with overnight cultures of EcNΔdapA strains comprising plasmids: pGB2 and pCas9-gRNA-hPD1; or pCas9-gRNA-hPD1 alone as a first negative control; or pGB2 alone as a second negative control. Bacteria were added at a multiplicity of infection (MOI) of 500, 1000, or 2000 in ImmunoCult™-XF T Cell Expansion Medium media supplemented with IL-2. Additionally, primary T cells electroporated with pCas9-GFP-gRNA-hPD1 were seeded into bacteria-free wells as positive controls. Plates were centrifuged at 100×g for 10 min in a swinging bucket centrifuge, to initiate contact between cells and bacteria, and incubated for 1 hour at 37° C. and 5% CO₂. Next, well contents were transferred to individual 15 ml falcon tubes and washed trice with Phosphate Buffered Saline (Gibco™ PBS, pH 7.4, Fischer Scientific) at 300×g for 5 min at RT. The pellet was re-suspended in ImmunoCult™-XF T Cell Expansion Medium supplemented with IL-2 plus gentamicin to kill extracellular bacteria and further cultured for 24 hours at 37° C. and 5% CO₂ in an Incuyte S3 live imaging machine. After 24 hours, the cells were washed once in PBS at 300×g for 5 min. To determine hPD1 knockout, cells were incubated with recombinant anti-CD3d antibody (ab208514) and anti PD-1 antibody (ab52587, Abcam) and analysed on a flow cytometer. A sample aliquot was also analysed on a fluorescent microscope for visual confirmation of flow cytometer results.

[0174] To determine hPD1 knockout T cell activity, the infected activated T cells were re-suspended in ImmunoCult™-XF T Cell Expansion Medium supplemented with IL-2 and co-cultured with the PD-L1⁺ human breast cancer cell line MCF-7 (Y. Zheng et al., 2019) in a flat-bottom 6-well plate at a seeding density 6×10⁵ at a ratio of 1:1. Co-cultures were incubated in the presence of IncuCyte® Cytotox Red Reagent for counting of dead cells. The co-cultures were monitored at 37° C. and 5% CO₂ in an Incuyte S3 machine and analysed for an increase in red fluorescent signal as an indicator for T cell activity.

[0175] In vivo CRISPR knockout of hPDCD1: A group of CB6F1 mice were injected subcutaneously in the left and right flank with PD-L1 expressing CT26 murine colorectal carcinoma cells (ATCC CRL-2638). After 7 days, sub-groups of these mice were injected i.v. with overnight cultures of EcNΔdapA strains in PBS comprising of plasmids: pGB2 and pCas9-gRNA-hPD1; or pCas9-gRNA-hPD1 alone as a first negative control; or pGB2 alone as a second negative control, or PBS as a third negative control. An additional sub-group of mice were injected with Anti-mouse/human PD-L1 antibody (ab238697, Abcam) alone as a positive control. Body weight, temperature, survival, and food intake was measured daily to monitor signs of morbidity. Tumor size was measured daily to assess the cytotoxic activity of hPD1 knockout T cells. Tail vein blood samples were taken daily for later flow cytometric analysis of PD-1 expression of circulating lymphocytes as well as plating on LB agar plates with appropriate supplements and selection for determination of bacterial load in the blood stream. All mice were terminated after 20 days when spleens and tumors were collected for flow cytometric analysis of circulating lymphocytes and tumor cells. Heart puncture blood was assessed for cytokine/chemokine levels.

### Example 8 Recombinant Bacteria-Mediated Delivery Vectors (Inv-Hly) to Transfer Therapeutic OspF Protein to Primary T Cells

[0176] Methods

[0177] Primary human activated pan T cells were diluted to 4×10⁵ cells/ml in pre-warmed ImmunoCult XF T Cell Expansion medium supplemented with 25 ng/ml of IL-2 and added to 96 well plates at 100 μl per flask. Overnight cultures of either TOP10, containing either the invasive plasmid pGB3 or the invasive and therapeutic plasmid pGB4, were diluted in complete cell culture medium to an MOI of 1000 or 4×10⁸ cfu/ml. 100 μl of bacterial dilutions were added to the wells and plates were incubated for 2 hours at 37° C. and 5% CO₂. Cell suspensions were then transferred to a 96 well V-bottom plate and washed once with 100 μl of PBS. Cell pellets were resuspended in 200 μl pre-warmed complete culture medium containing MycoZap Plus-CL (500×). Cells were transferred to a new 96 well F-bottom plate and incubated for up to 3 days. For sample collection, cells were pelleted in a 96 well V-bottom plate and a total of 8 wells per replicate sample were resuspended and pooled in a total volume of 100 μl of PBS. Pooled samples were pelleted, resuspended in 180 μl of PBS and 20 μl of Image-iT Fixative Solution (4%) for final dilution of 0.4% paraformaldehyde, and incubated for 7 minutes at RT. The cell suspension was centrifuged, resuspended in 200 μl of PBS and 0.5 μl eBioscience Fixable Viability Dye eFluor® 780, and incubated at 4° C. for 15 minutes. From this point onward, all steps were performed with the samples protected from light. Next, cells were pelleted and fixed in 100 ul Image-iT Fixative Solution (4%) for 7 min at RT. The fixed cells were centrifuged and permeabilized by incubation in 100 μl of ice-cold 90% methanol in PBS for 15 minutes at 4° C. Fixed and permeabilized samples were pelleted and resuspended in 100 μl stain buffer followed by incubation at 4° C. for 15 minutes. After centrifugation to remove supernatants, cells were resuspended in 93 μl stain buffer and labelled with 5 μl of Phospho-Erk1/2 (Thr202, Tyr204) PE labelled antibody (MILAN8R, Thermo Fischer Scientific) and 2 μl of Erk 1/2 AF488 labelled antibody (C-9, Santa Cruz Biotechnology). Following an overnight incubation at 4° C., labelled cells were washed trice with 100 μl stain buffer and incubated in 100 ul of PBS containing 100 μg/mL DNAse and 5 mM MgCl₂ for 30 minutes at RT. Next, cells were washed once with 100 μl PBS containing 5 mM MgCl₂, resuspended in 200 μl PBS containing 5 mM MgCl₂ and 50 μg/mL DNAse, and analysed on a Novocyte Quanteon flow cytometer.

[0178] Results

[0179] The MAPK phosphothreonine lyase OspF is a virulence factor of Shigella flexneri that has been shown to irreversibly dephosphorylate the human transcription factor extracellular signal-regulated kinase 1/2 (Erk). Erk dephosphorylation results in reduced TCR signaling, activation, and proliferation of T cells through inhibition of the MAPK/Erk pathway (Mattock & Blocker, 2017; Wei et al., 2012). OspF dephosphorylation of Erk has therefore high therapeutic potential in Erk-deregulated cancers such as Childhood Acute Lymphoblastic Leukaemia. As OspF was of bacterial origin and the mechanism of action in T cells was well understood, it was chosen for delivery to primary T cells using the inv-hly BACTERIAL INTRACELLULAR DELIVERY VECTOR system. Primary human activated T cells were infected with E. coli TOP10 carrying the therapeutic plasmid pGB4, which contained the inv-hly system as well as the therapeutic protein OspF. Uninfected cells or cells infected with bacteria carrying the invasive plasmid without OspF (pGB3) served as negative controls. Following 2 hours of infection, cells were cultured for up to 2 days in the presence of antibiotics and labelled with a viability dye as well as antibodies for total Erk (t-Erk) and phosphorylated Erk (p-Erk). Labelled cells were analysed on a flow cytometer to determine p-Erk percentages of infected cells. The gating strategy was as follows: All events>T cells>Single cells>live cells>t-Erk>p-Erk. The t-Erk positive populations were gated based on the uninfected cell controls where the smallest t-Erk peak was excluded and the majority of cells were included in the gate (FIG. 8a). Erk is an essential protein for a number of cellular processes such as proliferation, stress response, and differentiation. Accordingly, it would be expected that the majority of live T cells would express this crucial transcription factor. In addition, all live events were analysed for t-Erk (All events>live cells>t-Erk) to verify the t-Erk negative population (FIG. 8b). In this way, living bacteria and debris would also be included in the t-Erk histogram and could be used to verify the t-Erk negative gate, as bacteria and debris did not express Erk. Analysis of p-Erk percentages of live t-erk positive T cells revealed that cells infected with the therapeutic bacteria (pGB4) had a statistically significant reduction in p-Erk percentages, which suggested lower cell activation levels (FIG. 8c). p-Erk percentages were reduced by more than 60% when compared to the uninfected control cells (FIG. 8d). In contrast, cells infected with control bacteria (pGB3) had a statistically significant increase in p-Erk percentages. Nearly 10% higher percentages of p-Erk at 4 hours p.i. were observed before percentages returned close to control levels at 48 hours p.i. Comparison of t-Erk percentages of infected cells revealed that, while cells infected with control bacteria only had around 3% less t-Erk positive cells, pGB4 infected cells had around 15% less t-Erk positive cells than the uninfected control (FIG. 8d). Previous studies demonstrated that OspF reduced cellular p-Erk levels while leaving t-Erk levels unchanged (Li et al., 2007), and therefore it might be argued that the observed reduction in p-Erk percentages in cells infected with pGB4 bacteria was due to a reduction in overall t-Erk percentages and not due to the delivered OspF protein. However, this is not the case here, as a decrease in t-Erk percentages in pGB3 bacteria infected cells did not cause a decrease in p-Erk but rather showed an increase in p-Erk percentages, when compared to the uninfected control (FIG. 8d). The observation that cells infected with therapeutic bacteria did not simply return to control cell p-Erk percentages but rather decreased levels by more than 60% demonstrated the high potency of the delivered OspF therapeutic and thereby also the efficiency of the bacterial delivery system. Viabilities of pGB4 infected cells were lower than in the other experimental conditions, as indicated by lower percentages of t-Erk+live T cells (FIG. 8a). This decreased viability further validated the efficacy of OspF delivery, as this enzyme had been shown to irreversibly reduce p-Erk levels and therefore proliferation rates and viability.

[0180] Transfer of OspF also increased the percentage of live bacteria, shown as a stark decrease in the percentage of live cells that were t-Erk positive (FIG. 8b), as transfer of OspF reduced T-cell activation and thereby direct killing of bacteria lead to more viable bacterial cells that remained. As pGB3 bacteria did not carry the therapeutic they did not reduce cell activation, which resulted in more bacterial killing by activated T cells. As infected cells were grown in the presence of antibiotics, it was argued that detected live bacteria survived partly through spontaneous resistance mutations but largely due to adherence of bacterial cell clumps to the T cells, as previously observed microscopically, which sheltered bacterial cells from antibiotic exposure. Thus, increased bacterial survival presented an additional confirmation of successful therapeutic transfer. Lastly, primary T cells used for this study were activated for several days prior to infection. Consequently, infected cells were similar to activated T cells present in the human body during inflammatory disorders. The in vitro reduction of p-Erk levels in these activated cells by the therapeutic bacteria provides strong evidence for the potential therapeutic use of the BACTERIAL INTRACELLULAR DELIVERY VECTOR in inflammatory diseases in vivo.

[0181] In conclusion, this experiment showed, for the first time, that a bacterium engineered to express the inv-hly system can deliver a therapeutic protein at high efficacies to human T cells.

### Example 9 Use of a Recombinant Bacteria-Mediated Delivery Vector (Inv-Hly) to Mediate Delivery of NleB and NleE Proteins into T-Cells

[0182] Engineered E. coli strains (EcNΔdapA) containing the inv-hly expression plasmid (pV3) and a plasmid comprising a recombinant nucleic acid molecule encoding T3SS effectors s NleE and NleB are used to infect T-cells (e.g. NF-κB Reporter Jurkat) in vitro. Suppression of NF-kappaB activation in T-cells lines comprising an NF-κB Reporter serves to demonstrate that the engineered E. coli of the invention can transfer NleE and NleB proteins into the infected cells and interfere with the activation of selected host transcriptional regulators. Such T cells, whose host inflammatory pathways are manipulated by NleE/NleB-mediated suppression of NF-kappaB activation, confer a therapeutic effect in mouse models exhibiting TNP-KLH induced colitis, experimental allergic encephalomyelitis (EAE), and collagen-induced arthritis.

[0183] Methods

[0184] Plasmid construction: A DNA molecule comprising an operon encoding T3SS effectors NleE [SEQ ID No.: 219] and NleB [SEQ ID No.: 216] from the enteropathogenic E. coli 0127-H6 isolate EPEC E2348/69 was cloned into the pUC57-Kan plasmid (Genscript). The NleBE operon was operably linked to the strong constitutive promoter BBa_J23118 (Anderson library) and an optimised RBS sequence inserted before each gene. The predicted strength (EMOPEC) of the RBS upstream of NleE was higher than the RBS for the NleB gene to allow sufficient expression of both genes from a single promoter. The resulting plasmid, pNleBE was transformed into EcNΔdapA together with the inv-hly expression plasmid pV3 (Table 4).

[0185] In vitro NFκB inhibition: Bacterial transfer of the NleB and NleE proteins was performed in a flat-bottom 6-well plate, seeded with 1.2×10⁶ cells/well of the NF-κB Reporter (Luc)—Jurkat Cell line (Jurkat-Luc, BPS Bioscience) which comprises a firefly luciferase gene controlled by 4 copies of NF-kB response element upstream of a TATA promoter. Cells were infected with overnight cultures of EcNΔdapA strains comprising plasmids: pV3 and pNleBE; or pNleBE alone as first negative control; or pV3 alone as a second negative control. Bacterial cells of the EcNΔdapA strains were added at a multiplicity of infection (MOI) of 500, 1000, or 2000 in RPMI media supplemented with 10% fetal bovine serum (FBS). As a positive control, Jurkat cells were treated with 0.1 nM of the glucocorticoid triamcinolone acetonide (TA) (Tsaprouni, Ito, Adcock, & Punchard, 2007) alone. Plates were centrifuged at 100×g for 10 min in a swinging bucket centrifuge, to initiate contact between cells and bacteria, and incubated for 1 hour at 37° C. and 5% CO₂. Next, well contents were transferred to individual 15 ml falcon tubes and washed trice with Phosphate Buffered Saline (Gibco™ PBS, pH 7.4 at room temperature, Fischer Scientific) at 300×g for 5 min at RT. The pellet was re-suspended in complete growth medium plus gentamicin, to kill extracellular bacteria, and 10 ng/ml TNF-α was added for NFκB activation and subsequent stimulation of IL-8 production. After a 6-hour exposure to TNF-α, cells were washed thrice in RT PBS and re-suspended in complete growth medium plus gentamicin for 12 hours (overnight) at 37° C. and 5% s CO₂. Next, cells were centrifuged at 300×g for 5 min to collect cell supernatants. A 500 ul sample of the supernatant was used to determine IL-8 concentrations using a commercial ELISA kit for IL-8 (ELISA, human IL-8 Duo Set; R&D Systems, Minneapolis, MN, USA), according to the manufacturer's instructions. The remaining supernatant was used to re-suspend the cell pellets in their wells. 100 μl of ONE-Step™ Luciferase Assay reagent (BPS Bioscience) was added to each well and the plates were incubated for 30 minutes at RT followed by luminescence measurement in a luminometer to determine NFκB induced luciferase production.

[0186] In vivo NFkB inhibition: In vivo bacterial transfer of NleB and NleE proteins by invasive E. coli strains expressing an NleBE operon into T cells was performed on members of mouse models having TNP-KLH induced colitis or EAE, or collagen-induced arthritis as previously described (Kuhn & Weiner, 2016). Members of each mouse model were injected i.v. with overnight cultures of EcNΔdapA strains in PBS either comprising the plasmids: pV3 and pNleBE; or pNleBE plasmid alone as first negative control; or pV3 alone as second negative control. The treated mice are analysed for each of the disease model specific markers as described in example 6.

### Example 10 Use of a Recombinant Bacteria-Mediated Delivery Vector (Inv-Hly) to Mediate Delivery of L-Asparaginase into T-Cells

[0187] Engineered E. coli strains (EcNΔdapA) containing the inv-hly expression plasmid (pGB2) and a plasmid comprising a recombinant nucleic acid molecule encoding L-asparaginase II (ansB) are used to infect T-cells (e.g. the human acute leukemic T-cell lymphoblast, Jurkat E6-1) in vitro. Since acute leukemic T-cells lines cannot synthesize asparagine, asparagine starvation leads to their apoptosis and cell death. Hence death of acute leukemic T cells following contact with cells of the engineered E. coli strains, serves to demonstrate that they can transfer asparaginase II into the infected cells and cause asparagine starvation. When administered to a mouse model for acute leukemia, cells of the engineered E. coli strains may confer a therapeutic effect.

[0188] Methods

[0189] Plasmid construction: The L-asparaginase II gene ansB (NCBI Reference Sequence: NP_415200.1) [SEQ ID No.: 222] was cloned into a pUC57 plasmid operatively linked to the promoter BBa_J23100, an optimised RBS sequence (98.3% EMOPEC prediction), and a transcription terminator T1 from the E. coli rrnB gene. The constructed plasmid, pUC57-ansB, was transformed into EcNΔdapA together with the inv-hly expression plasmid pGB2 (Table 4).

[0190] In vitro L-asparaginase delivery: Bacterial transfer of L-asparaginase was performed in a flat-bottom 6-well plate, seeded with 1.2×10⁶ Jurkat E6-1 cells per well. Cells were infected with overnight cultures of EcNΔdapA strains comprising the plasmids: pGB2 and pUC57-ansB; or pUC57-ansB alone as a first negative control; or pGB2 alone as a second negative control. Bacteria cells of the EcNΔdapA strains were added at a multiplicity of infection (MOI) of 500, 1000, or 2000 in RPMI media supplemented with 10% fetal bovine serum (FBS). Additionally, Jurkat E6-1 cells were treated with commercially available L-asparaginase from Escherichia coli (Sigma Aldrich) as a positive control. Plates were centrifuged at 100×g for 10 min in a swinging bucket centrifuge, to initiate contact between cells and bacteria, and incubated for 1 hour at 37° C. and 5% CO₂. Next, well contents were transferred to individual 15 ml falcon tubes and washed trice with Phosphate Buffered Saline (Gibco™ PBS, pH 7.4 at room temperature, Fischer Scientific) at 300×g for 5 min at RT. The pellet was re-suspended in complete growth medium plus gentamicin, to kill extracellular bacteria, and Incucyte® Caspase-3/7 Green Reagent and IncuCyte® Cytotox Red Reagent was added to monitor apoptosis and cell death, respectively. Cells were incubated 37° C. and 5% CO₂ for 48 hours inside an Incucyte S3 live cell imaging machine.

[0191] In vivo L-asparaginase delivery: Five- to seven-week-old female NOD.Cg-Prkdcscid Il2rgtmlWjl/SzJ (NSG) mice (The Jackson Laboratory) (Mamonkin, Rouce, Tashiro, & Brenner, 2015) were intravenously injected with 3×10⁶ firefly luciferase expressing Jurkat E6-1 cells (Jurkat-FFluc). After 3- or 6-days post engraftment, mice were intravenously injected with overnight cultures of EcNΔdapA strains comprising the plasmids: pGB2 and pUC57-ansB; or pGB2 alone as a first negative control; or PBS without bacteria as a second negative control. As a positive control, mice were injected intraperitoneally with 6 U/g L-asparaginase (Sigma Aldrich) (Takahashi et al., 2017) 3- or 6-days post-engraftment. To monitor tumor burden, mice were injected intraperitoneally with D-Luciferin (150 ug/kg) and luminescence was determined with an IVIS Imaging system (Caliper Life Sciences). Daily tail vein blood samples were taken to determine tumor load via flow cytometry and to measure cytokine levels via ELISA.

### Example 11 Engineering Bacteria-Mediated Delivery Vectors Expressing a Gp120-Gp41-Antigen 43 (FLU) Fusion Protein

[0192] A bacteria-mediated delivery vector was engineered by transforming the deletion strain, EcN-pMUT1 ΔdapA with recombinant nucleic acid molecules encoding the envelope s glycoproteins gp120 and gp41 found in Human Immunodeficiency Virus 1 (HIV-1) and a third protein derived from a member of the 1.B.12.8.2 autotransporter-1 (at-1) family. When the three proteins are expressed as domains linked together in a fusion protein, they confer on the cell the ability to act as a bacteria-mediated delivery vector for delivery of the therapeutic agent to a mammalian non-phagocytic immune cell.

[0193] Methods:

[0194] Cloning “Gp120-Gp41-Antigen 43 (FLU)” Expression Plasmid:

[0195] The construction of a novel HIV env protein complex for bacterial expression was based on a modified protocol of Rathore et. al., In short, the sequence of HIV env protein mimic BG505 NFL.664 was chosen as a design template (Sarkar et al., 2018) due to favourable CD4 CCR5 cell targeting tropism and reduced glycosylation sites. The deleted membrane proximal external region (MPER) of the BG505 NFL.664 sequence was added back to maintain crucial membrane fusion functionality. The missing MPER sequence was added from uniprot entry Q2N0S6 which was used for annotation of the BG505 NFL.664 protein crystal structure 6B0N. In addition, the native amino acid, isoleucine, at position 559 was returned to maintain structural flexibility. To improve intracellular protein assembly and bacterial outer membrane expression, protein glycosylation was removed through mutation of asparagine (N) residues of N-linked glycosylation motifs (NXT/S) in the amino acid sequences of gp120 and gp41. The creators of the BG505 NFL.664 construct published identified glycosylation sites in their protein construct but were only able to detect glycans in the resolved crystal structure of the protein (Sarkar et al., 2018). The 6B0N protein sequence however showed stretches of sequence that contained NXS/T glycosylation motifs that lacked a secondary structure. In addition, glycosylation sites identified by the authors were described at incorrect AA positions due to incomplete numbering in the 6B0N PDB file stemming from breaks in secondary structure. Therefore, it was decided to mutate all NXS/T motifs in the sequence to further design the novel env protein complex. A total of 29 potential glycosylation sites were identified in the protein sequence, equal to the number identified in the reference HIV-1 strain HxB2. Using the NetNGlyc 1.0 Server, 21 of the 29 potential motifs were predicted to be likely glycosylated (Gupta & Brunak, 2002). After NXS/T motifs were identified, the tool HBPLUS was used to detect potential hydrogen bonds between Asn and neighbouring AA to avoid unsatisfied hydrogen bonding groups upon NXS/T mutations. AA frequencies at NXS/T motifs were identified from a multiple sequence alignment of 3978 HIV1 env sequences from a 2019 HIV-1 sequence compendium (Erk.hiv.lanl.gov) using the webtool AnalyzeAlign. The BG505 NFL.664 env AA sequence was used as a reference sequence with the following AA sequence added from the HxB2 reference sequence to the sequence beginning, to improve alignment numbering: MRVKEKYQHLWRWGWRWGTMLLGMLMICSATEK (SEQ ID NO.: 282). The ASN in the BG505 NFL.664 env sequence was then changed to the second most frequent AA at this position to remove glycosylation. The AA was changed to a less frequent AA if any unfavorable charge variations or structurally similar Ala and Gln were encountered. Using the software Chimera, the mutated sequence was computationally modelled against the original 6B0N sequence to determine any possible structural changes caused by AA mutations (Pettersen et al., 2004). Due to partially missing secondary structures, the 6B0N file was first modelled using Chimera to create a complete protein structure model. The structural similarity of the novel mutated env model with the refined 6B0N model was evaluated in Chimera based on the GA341 model score (Values higher than 0.7 generally indicate a reliable model with more than 95% probability of having the correct fold), the zDOPE normalized Discrete Optimized Protein Energy score (Negative values indicate better models), and the estimated RMSD model score (lower values indicate better models). The 2×GGGGS linker present in BG505 NFL.664 was maintained as it was previously determined to be of optimal length to allow native-like non-covalent bond formation and enable correct trimer formation (Sharma et al., 2015).

[0196] After confirming structural integrity of glycosylation site mutations, the E. coli outer membrane autotransporter Antigen 43 (flu) was added to the mutated protein sequence to enable bacterial surface expression. As the gp120 part of the env complex needed to be exposed away from the bacterial membrane and gp41 needed to be in close proximity of the bacterial membrane, anchoring could not be done through commonly used n-terminal fusion to an anchoring protein. Instead, the nucleotide sequence encoding the fused gp120-linker-gp41 domains was cloned between the coding sequences for the signal peptide and the N-terminus of the linker peptide of flu. The linker peptide ensured that the fused gp120-linker-gp41 proteins were displayed on the surface of the bacterial cell and not inside the R-barrel of the Flu protein where the Flu autochaperone C-terminus is located. The autotransporter domain serves to anchor the envelope complex to the bacterial cell membrane, and thereby performs the function of the hydrophobic transmembrane region of gp41, which was omitted from the fusion protein encoding gene construct. The resulting plasmid pCOLA_gp120-gp41-flu (SEQ ID NO 169) was transformed into E. coli TOP10. Bacteria were labelled with anti-HIV gp160 antibody (FITC conjugated, orb461521, Biorbyt) and observed on a Leica DM4000 B fluorescent microscope (Leica Microsystems) to confirm surface expression of gp160.
[0197] pGP140_Flu_hly plasmid: An optimized version of pCOLA_gp120-gp41-flu was constructed by inserting the Sau96I hly fragment from pSQ11 into the pCOLAgp120-gp41-flu plasmid, using standard Gibson assembly, to replace the lacI promoter and lac repressor gene region (6997-8157).

[0198] Results:

[0199] In this study, a novel bacterial intracellular delivery vector was constructed that exploits the natural CD4+CCR5+ cell specific targeting feature of the HIV-1 env protein complex gp120-gp41. Recombinant versions of this protein complex are termed gp140, not to be confused with the pre-cleavage complex gp160. In its native viral host, the gp120-gp41 complex initiates fusion of the viral capsid with the target cell membrane to enable virus entry into the host. In contrast to viruses and mammalian cells, gram negative bacteria contain both outer and inner membranes. Therefore, as demonstrated herein, expression of gp120-gp41 on the E. coli outer membrane surface allows for targeted delivery of periplasmic and/or cytoplasmic molecules to CD4+CCR5+ T cells in a novel manner, as illustrated in FIG. 9.

[0200] The design strategy used for the novel gp120-gp41 construct was based on the BG505 NFL.664 env 6B0N sequence (Sarkar et al., 2018). After the mutation of 29 potential glycosylation sites and addition of several missing AA sequences, the novel construct was modelled against the reference structure 6B0N to validate that original secondary structures were maintained. Using Chimera, the novel model was confirmed to be highly similar to the reference model with GA341, zDOPE, and estimated RMSD values of 1.00, −0.13, and 7.347, respectively. Some of the predicted alpha helixes in the gp120 model were slightly shifted compared to the reference model structure. The amino acid sequence at these areas was the same and it was therefore assumed not to result in any change in protein function. After cloning of the novel BACTERIAL INTRACELLULAR DELIVERY VECTOR gp120-gp41 env construct into an expression plasmid and transformation of the resulting pCOLAgp120-gp41-flu plasmid into E. coli TOP10, surface expression of BACTERIAL INTRACELLULAR DELIVERY VECTOR gp120-gp41 was investigated using a FITC labelled anti-HIV gp160 antibody. As shown in FIG. 9, several bacterial cells were stained with the gp160 antibody, with varying intensity. This staining confirmed the surface expression of the BACTERIAL INTRACELLULAR DELIVERY VECTOR gp120-gp41 complex. In order to increase expression further, the plasmid was transferred into the E. coli strain T7 (see further example herein), which was specifically designed to allow strong surface expression of complex protein structures.

### Example 12 Recombinant Bacteria-Mediated Delivery Vectors (Gp140) to Transfer Periplasmic Protein to Primary T Cells

[0201] Methods

[0202] Primary human activated pan T cells were diluted to 5×10⁵ cells/ml in pre-warmed ImmunoCult XF T Cell Expansion medium supplemented with 25 ng/ml of IL-2 and added to 48 well plates at 200 μl per flask. An overnight culture of either E. coli T7, carrying the invasive plasmid pCOLA-gp120-gp41 (SEQ ID NO. 169) and the periplasmic fluorescent protein reporter plasmid pSW002-Pc-TorA(sp)-mTurquoise2 (SEQ ID NO. 268), was diluted in complete cell culture medium to an MOI of 1280 or 6.4×10⁸ cfu/ml. E. coli T7+pCOLA-gp120-gp41 without the reporter plasmid as well as uninfected T cells served as negative controls. 200 μl of bacterial dilutions were added to the wells and plates were centrifuged at 100×g for 30 seconds to initiate contact between the bacteria and human cells. The co-cultures were incubated for 2 hours at 37° C. and 5% CO₂ to allow cell infections to occur. Next, cell suspensions were pelleted in 96 well V-bottom plates and resuspended in 200 μl of complete cell culture medium containing 50 μg/ml Gentamicin. Cell suspensions were transferred to new 48 well plates and incubated for a total of 6 hours. For sample collection, cells were pelleted in 2 ml Eppendord tubes and fixed in 1 ml of Image-iT Fixative Solution (4%) for 15 minutes at RT. Fixed cells were pelleted, resuspended in 100 μl PBS and transferred to a new 96 well plate for analysis on a Cytoflex S flow cytometer. 10 μl of each sample was stained with FITC conjugates anti-E. coli LPS antibody, mounted on microscopy slides and observed under a Leica DM4000 B fluorescent microscope

[0203] Results

[0204] Infected cells were analysed for mTurquoise2 expression on a fluorescence microscope for visual detection and a flow cytometer for quantification. A differential antibody staining method was used for fluorescence microscopy where an anti-E. coli LPS antibody labelled extracellular bacteria and absence or presence of mTurquoise2 fluorescence indicated successful or unsuccessful protein delivery, respectively. Flow cytometry revealed that cell numbers decreased over time for the bacterial conditions, as expected due to the cells being exposed to bacterial endotoxins and nutrient depletion in the media during infection periods (FIG. 11a). In contrast, uninfected cell controls slightly increased in cell number over time. Nearly 50% of T cells infected with bacteria expressing gp140 and mTurquoise2 exhibited mTurquoise2 fluorescence at 0 h p.i., which decreased overtime. Other control conditions showed no mTurquoise2 signal at any timepoint sampled (FIG. 11b). While flow cytometry analysis seemed to indicate high rates of periplasmic protein transfer, fluorescence microscopy showed drastically different results. As seen in FIG. 11c, microscopy analysis revealed that the large majority of observed cells were surrounded by high amounts of mTurquoise2 positive bacteria and that this bacterial mTurquoise2 signal decreased overtime. Furthermore, no mTurquoise2 fluorescence was observed to originate from the T cells themselves.

[0205] This observation demonstrated that the majority of observed fluorescence from cells during flow cytometry analysis most likely originated from adherent bacteria and not from intracellular delivery to T cells. On the other hand, this observation also demonstrated the high efficacy of T cell binding by the gp140 protein complex. Considering the weak fluorescence of mTurquoise2 observed on microscopy images, fluorescent proteins, concentrated in the bacterial periplasm, could be highly diluted in their fluorescent signal upon release into the mammalian cell periplasm. This would likely result in a weak fluorescence signal within infected target cells which would be below the detection limit of fluorescence analysis from both microscopy and flow cytometry.

[0206] Despite this, microscopy analysis still revealed several cells with adherent bacteria that lacked mTurquoise2 fluorescence which indicated periplasmic protein transfer. The number of observed protein transfer events per cell increased over time, which indicated the high numbers of adherent cells could possibly translate into high periplasmic transfer events if infected cells were observed for more than 6 hours. Of note was an observation at the 5 hour time point where one non-adherent bacterial cell lacked mTurquoise expression (FIG. 11c, white circle). It was argued that due to the exposure to antibiotics in the media after infection, bacteria died and lysed overtime which released the mTurquoise signal from the periplasm into the media, thereby decreasing the signal associated to those bacterial cells. This hypothesis would also explain the consistent decrease over time in mTurquoise positive cells detected with flow cytometry. Hence, while periplasmic proteins theoretically are useful tools to study protein transfer specifically originating from the bacterial periplasm, microscopic analysis of this experiment revealed limitations of their use due to false positives of protein loss from lysing bacteria.

### Example 13 Recombinant Bacteria-Mediated Delivery Vectors (Gp140) to Transfer Secreted Protein to PBMCs

[0207] Methods

[0208] PBMCs isolated from buffy coats were diluted to 2.2×10⁶ cells/ml in ImmunoCult XF T Cell Expansion medium supplemented with 25 ng/ml of IL-2 and added to a 50 ml suspension culture flask (Cellstar, Greiner Bio-One) at 5 ml per flask. Overnight cultures of E. coli T7+pCOLAgp120-gp41+pUC19 were diluted in complete cell culture medium at MOIs ranging from 640-1280 or 1.4×10⁹-2.8×10⁹ cfu/ml. E. coli T7+pCOLAgp120-gp41 infected cells or uninfected cells served as negative controls for protein transfer. 5 ml of bacterial dilutions were added to the cells and culture flasks were incubated for 2 hours at 37° C. and 5% CO₂. To terminate cell infections, flask contents were transferred to 50 ml falcon tubes (Corning) and washed once with PBS. To detach adherent PBMC, a cell scraper was used to dislodge cells. Washed cell pellets were resuspended in complete culture medium containing MycoZap Plus-CL (Lonza Bioscience) and transferred to new 50 ml suspension culture flasks. Cell cultures were incubated for 2-24 hours at 37° C. and 5% CO₂. In order to detect β-lactamase protein transfer, cultured cells were labelled with the LiveBLAzer™ FRET-B/G Loading Kit with CCF4-AM (Thermo Fischer Scientific), following the manufacturer's instructions. In short, cells were centrifuged at 300×g for 7 minutes and resuspended in 6× loading solution containing CCF4-AM (solution A), solution B, and solution C/sort buffer, followed by incubation at RT for 1 hour under gentle shaking, protected from light. From this point onwards, cells were kept protected from light to avoid degradation of fluorochromes. Labelled primary cells were resuspended in 900 μl of PBS and 100 μl of Image-iT Fixative Solution (4%) for a final dilution of 0.4% paraformaldehyde. Cells were incubated for 7 minutes at RT, followed by centrifugation and resuspension in 999 μl of PBS and 1 μl of eBioscience Fixable Viability Dye eFluor® 780 (Thermo Fischer Scientific). After incubation at 4° C. for 15 minutes, cells were centrifuged and resuspended in 1 ml Image-iT Fixative Solution (4%). Following incubation at RT for 7 minutes, cells were washed once in 1 ml of PBS, resuspended in 500 μl stain buffer, and incubated for 15 minutes at 4° C. Next, cells were centrifuged and resuspended in 170 μl stain buffer and 10 μl each of anti-human CD8A SK1 APC antibody (Invitrogen, Thermo Fischer Scientific), anti-human CD3 OKT3 SB600 antibody (Invitrogen, Thermo Fischer Scientific), and anti-human CD4 OKT4 PE antibody (Invitrogen, Thermo Fischer Scientific). Cells were incubated with the antibodies overnight at 4° C. and the next day washed twice with 5 ml stain buffer. Antibodies and their dilutions are listed in table 5.

TABLE 5
antibodies

| AB type | Target antigen | Conjugate | Dilution | Ref number |
|---|---|---|---|---|
| Primary | human/mouse phospho-ERK1/2 | ebio pe | 1:20 | 12-9109-42 |
| Primary | human cd49d/integrin alpha 4) | — | 1:100 | 14-0499-82 |
| Primary | human erk 1/2 | af 488 | 1:50 | sc-514302 af488 |
| Primary | human cd3 | fitc | 1:20 | 555332 |
| Primary | e. coli serotype o/k | — | 1:100 | pa1-25636 |
| Primary | e. coli serotype o/k | fitc | 1:10 | pa1-73029 |
| Primary | hiv gp160 | FITC | 1:50 | orb461521 |
| Primary | anti-human CD8A | APC | 1:20 | 17-0087-42 |
| Primary | anti-human CD3 | SB600 | 1:20 | 63-0037-42 |
| Primary | anti-human CD4 | PE | 1:20 | 12-0048-42 |
| Secondary | mouse IgG1 | bv480 | 1:1000 | 746384 |
| Secondary | rabbit IgG | atto 550 | 1:1000 | 43328-1ml-f |

[0209] In an effort to remove cell aggregates in the suspension, cells were resuspended in 300 μl of PBS containing 100 μg/mL DNAse and 5 mM MgCl₂ and incubated for 30 minutes at RT. Cell suspensions were washed once with 1 ml of PBS containing 5 mM MgCl₂ and resuspended in 600 μl of PBS containing mM MgCl2 and 50 μg/mL DNAse. Finally, the cell suspension was gently passed through a pre-wet 70 μM reversible cell strainer (Stemcell Technologies) into 12×75 mm FACS tubes. Prepared cell suspensions were analysed on a Novocyte Quanteon flow cytometer. For compensation of fluorochrome spillover, single color control samples were prepared from cells infected with invasive bacteria carrying a β-lactamase expression plasmid. Auto-compensation was performed using the FlowLogic analysis software, where gates for positive populations as well as compensation values were manually adjusted to minimize fluorescence spillover. A compensation control for CCF4-AM was used to determine spillover into other channels from the green and blue signals as well as spillover from other fluorochromes into the detection filters for green and blue signals. As the CCF4-AM control emitted both green and blue fluorescence signals, no compensation was applied from the green signal in the blue detection filter and vice versa. The compensation matrix is shown in table 6.

TABLE 6
Compensation matrix for gp140 mediated secreted protein transfer to
primary lymphocytes.

| | CD8 | | CCF4-AM | CCF4-AM | CD3 | CD4 |
|---|---|---|---|---|---|---|
| | (APC) | FVS780 | (Blue) | (Green) | (SB600) | (PE) |
| CD8 (APC) | 100.00 | 7.60 | −0.10 | −0.10 | 0.05 | 0.03 |
| FVS780 | 0.59 | 100.00 | 0.07 | 0.15 | 0.04 | 0.36 |
| CCF4-AM | 0.09 | 0.05 | 100.00 | 0.00 | 0.45 | 1.10 |
| (Blue) | | | | | | |
| CCF4-AM | −0.01 | 0.00 | 0.00 | 100.00 | 2.09 | −0.20 |
| (Green) | | | | | | |
| CD3 (SB600) | 0.28 | −0.10 | 91.09 | 0.73 | 100.00 | 93.67 |
| CD4 (PE) | −0.60 | −0.20 | −9.00 | −17.50 | 2.16 | 100.00 |

[0210] Results

[0211] Cells were analysed on a flow cytometer with the CCF4-AM assay to detect protein transfer. In addition to CCF4-AM substrate loading, infected cells were also labelled with an antibody panel that allowed the identification of T and non-T cells with CD3 and further identification of cell subtypes with CD4 and CD8. A viability dye was used to exclude dead cells from analysis. After gating for live singlet lymphocytes, CD3+ and CD3− populations were assessed for their blue fluorescence and blue populations were further characterized by their distribution of CD4/CD8 positive sub populations (see FIG. 12). On average, cells infected with bacteria had significantly lower viabilities than uninfected controls but nearly recovered to control levels at 4 hours post infection (FIG. 13). This suggested that while an adverse effect of bacterial infection was present initially, it did not persist for more than 4 hours. The lymphocyte gate was designed to tightly include the major population of the uninfected control at 2 hours p.i. whilst still including the majority of events in the other conditions (see FIG. 14). Infected cells at 4 hours p.i. presented an emerging population of lower FSC and higher SSC. As this shift in size and complexity was characteristic of dying cells, these populations were excluded from the lymphocyte gate. Unfortunately, no monocyte populations could be identified. This lack of monocytes was likely due to the use of a T cell specific expansion media for culture which might have enriched the PBMC population for lymphocytes. CD3 populations were distinguishable at high resolution and CD3+ to CD3− ratios were slightly below the expected range for healthy human lymphocytes with 58% and 46% of CD3+ cells on average at 2 h and 4 h p.i., respectively, compared to the reference value of 70-85% (Kleiveland & Kleiveland, 2015) (FIG. 13). Cells infected with the control bacteria consistently had the highest percentages of CD3+ cells followed by cells infected with β-lactamase expressing bacteria. For CD3+ cells, CD4+:CD8+ratios were slightly higher than expected, with around 3:1 and 4:1 at 2 hour and 4 hour p.i., respectively (see FIG. 15e&f). CD3− populations consisted mainly of double negatives (see FIG. 15g&h). The second largest percentage was CD8+, with two distinct populations. Since no additional cell markers were used, it was not possible to conclude which cell type these populations represented. The blue gate, used to identify protein receiving cells, was designed to exclude all cells from the uninfected negative control. No compensation was performed for the CCF4-AM compound due to a lack of adequate single colour controls, however this lack of compensation did not affect the gating strategy, as any possible bleed trough from CCF4-AM green fluorescence into the blue detection channel and vice versa would not change blue populations. This was argued as follows: If β-lactamase delivery created more blue CCF4-AM through cleavage and the blue fluorescence would bleed into the green detection channel, then the cell population should increase in both blue and green fluorescence intensity. However, the intention of this experiment was to examine changes in blue fluorescence as an indicator for protein delivery. The only relevant consequence of bleed through could potentially occur from an increase in green CCF4-AM cleavage which would decrease the amounts of uncleaved green CCF4-AM and thereby reduce the bleed through of green fluorescence into the blue channel. This would reduce the blue population. In this case, increased cleavage events would also decrease bleed through into the blue channel which would improve the quality of results. An increase in blue fluorescence signal from bleed through of the green CCF4-AM compound could only be caused by an increase in green compound which was neither expected nor observed in this experiment. As illustrated in FIG. 16a, 25% and 68% of cells infected with E. coli T7+pCOLA-gp140+pUC19 were blue and CD3+ at the 2 hour and 4 hour timepoint, respectively, which indicated high rates of protein transfer. These percentages were significantly higher than what was observed during infections of isolated primary T cells with the same strain (4% on average at 4 h p.i.). This was likely due to a lack of a viability dye and T cell markers in the previous experiment which could have led to a proportion of events being falsely identified as live T cells and thereby increasing the percentage of non-blue cells. In addition, isolated T cells from earlier infection experiments were activated which could have resulted in increased granzyme-induced bacterial killing by cytotoxic T-lymphocytes and therefore reduced protein delivery rates.

[0212] A significantly smaller fraction of CD3− lymphocytes infected with E. coli T7+pCOLA-gp140+pUC19, around 37% at 4 h p.i., also appeared to have blue cells, indicative of bacterial protein transfer FIG. 16b. As mentioned previously, due to a lack of further cell markers no definitive conclusions could be made as to which cells types this blue population might represent. However, further examination of cell subtypes within the blue population further elucidated the nature of cells. In general, percentages of CD3 subtypes within the blue populations were highly similar to the percentages of the total CD3 populations. As expected, based on the mechanism of gp140 receptor binding, the majority of CD3+blue cells were CD4+(FIG. 15c). In contrast, while most subtypes were evenly represented at 2 h p.i., the majority of CD3− blue cells at 4 Erk p.i. were CD8+FIG. 15d. It is possible that these cells represented CD3− CD8+natural killer (NK) cells, which could have internalised bacteria via phagocytosis. The second largest subtype of CD3− blue cells were CD4+. These subtypes could possibly represent CD3− CD4+Lymphoid Tissue Inducer (LTi) cells, which are cell of the T cell lineage. LTi cells are believed to mainly play a role during embryogenesis in the formation of secondary lymphoid organs. In adults, LTi cells are known to secrete survival signals to adaptive and innate lymphoid cells and they have been found to play a role in inflammatory diseases such as psoriasis and rheumatoid arthritis. Binding of the gp120 protein to CD4 on LTi cells might have been sufficient to initiate internalization of bacteria and subsequent protein delivery.

[0213] Given the highly similar distribution of CD3 cell subtypes within the blue CD3 population and the total CD3 population, one might argue that the majority of blue CD3+ cells being CD4+might not be due to specific gp140 targeting of the CD4 receptor but merely shows indiscriminate cell targeting that results in the initial cell distribution. If this argument was correct, then the percentage of CD4+ cells in the blue CD3+population should be the same as the CD4+percentage of the total CD3+population. For example, if the total CD3+population would consist of 70% CD4+ cells then the percentage of CD4+cells in the blue CD3+population should also be 70%. However, as seen in FIG. 15e&f, there were significantly higher percentages of CD4+ cells in the blue CD3+population than in the total CD3+population, around 5 and 7% more at 3 and 4 hours p.i., respectively. For the blue CD3− population, CD4+ and CD8+ cells were specifically targeted or specifically internalised the bacteria (FIG. 15g&h). It was also possible to evaluate the CD3 targeting efficiency of the gp140 system by analysis of CD3 expression of blue lymphocytes. Of the approximately 21% and 53% of lymphocytes that were blue roughly 74% and 63% were CD3+ at time points 2 hours and 4 hours, respectively (FIG. 17).

[0214] In conclusion, the results obtained in this study showed, for the first time, that both CD3 specific targeting and protein delivery by the bacterial gp140 delivery system occurred at high efficiencies.

### Example 14 Comparison of Injection Routes for Administration of Live Bacterial Delivery Vectors into Mice

[0215] Methods

[0216] Two different injection routes were evaluated for potential differences in tolerance to injected invasive bacteria in mice. Animal experiments were performed in house after approval from the Danish Animal Experiments Inspectorate. A total of 8 female CB6F1 mice, 6-8 weeks old, were housed in randomized pairs of four in Type3 cages inside a ScanTainer (Scanbur), with ad libitum access to water and regular chow diet (Altromin 1314, Altromin). Acclimatized animals were injected either intravenously or intraperitoneally with 100 μl of an overnight culture of EcNΔdapA, carrying invasive plasmid pSQ11, that was washed once in sterile PBS and diluted to 1×10⁹ cells/ml in sterile PBS. Immediately after injection, animals were closely monitored for changes in activity levels indicative of poor tolerance to bacterial injections. After 40 minutes, 4 hours and 1 week, 10 μl of blood were collected from the tail vein and stored in PBS on ice for later enumeration of viable bacterial cells. Immediately before and 7 days after bacterial injections, total body weight of the animals was measured. After 7 days, all animals were sacrificed through cervical dislocation and dissected to collect the liver, spleen, kidney, and lungs for later numeration of bacterial cells. The organs were weighted and transferred to gentleMACS C tubes (Miltenyi Biotec) containing 3 ml PBS for dissociation and generation of single cell suspensions using a gentleMACS Dissociator (Miltenyi Biotec). Dissociated liver, kidney, and lung samples were additionally passed through a 70 μm cell strainer. Single cell suspensions of prepared organs as well as tail vein blood samples were serially diluted in sterile PBS and plated on LB plates supplemented with DAP at a final concentration of 100 μg/ml and 50 μg/ml Kanamycin to enumerate live bacterial cell numbers.

[0217] Results

[0218] Only limited data exists on the safety of live EcN blood injections. Previous studies were all performed with non-auxotrophic E. coli strains which, in theory, were actively replicating after injection into the blood stream. In contrast, BACTERIAL INTRACELLULAR DELIVERY VECTORs designed in this study contained a DAP auxotrophy which inhibited growth in environments such as the bloodstream where DAP is not present. It was therefore hypothesised that higher amounts of auxotrophic bacteria could be safely injected into the bloodstream than what was deemed safe for non-auxotrophic replicating E. coli strains. It was first investigated whether a dose of 1×10⁸ cfu of auxotrophic EcN BACTERIAL INTRACELLULAR DELIVERY VECTOR could be administered safely into healthy mice via i.v. injection. In addition to i.v. injections, the intraperitoneal (i.p.) injection route was also investigated, as it was hypothesised that bacterial cells could be better tolerated through gradual release from the intraperitoneal cavity into the blood stream. Healthy, female, 6-8 weeks old CB6F1 mice were injected either i.v. or i.p with 1×10⁸ cfu/injection of the auxotrophic and invasive strain EcNΔdapA+pSQ11 and monitored over 1 week. Samples of tail vein blood and major organs were assessed for recovery of bacterial cells. Moreover, organ and body weights were measured to determine changes indicative of adverse reactions to BACTERIAL INTRACELLULAR DELIVERY VECTOR injections. As shown in FIG. 18a, bacteria could be recovered from blood for up to 4 hours p.i. with complete clearance after 1 week for both injection routes. I.v. injection lead to recovery rates of around 10⁶ cfu/ml blood on average at 40 minutes p.i. which was higher than for i.p. injections, as expected due to higher initial densities of bacteria in the blood. No bacteria were recovered from the kidneys, lungs, liver, or spleen at 1 week p.i. and all organs had normal weights for both injection routes (FIG. 18b). No change in total body weight was detected over 1 week for either of the injection routes (FIG. 18c). In conclusion, 1×10⁸ cfu/injections of auxotrophic and invasive BACTERIAL INTRACELLULAR DELIVERY VECTOR were well tolerated in healthy mice with no significant difference between injection route.

### Example 15 Maximum Injection Dose in Mice and Rats

[0219] Methods

[0220] In an effort to determine the highest possible dose of invasive bacteria that could be injected intravenously in a safe manner, rats and mice were injected in a dose escalating manner. A total of 10 female CB6F1 mice, 6-8 weeks old, or 10 female Sprague Dawley rats, 6-8 weeks old, were housed in randomized pairs of 2 in Type3 cages inside a ScanTainer (Scanbur), with ad libitum access to water and regular chow diet (Altromin 1314, Altromin). Overnight cultures of EcNΔdapA containing the invasive plasmid pGB3 were washed once in sterile PBS and diluted in sterile PBS to MOIs of 1030-1370 or 3×10¹⁰-4×10¹⁰ cells/ml for mouse injections, or MOIs of 29-98 or 3×10⁹-1×10¹⁰ cells/ml for rat injections. Either 100 μl or 500 μl of bacterial dilutions were injected intravenously into acclimatized mice or rats, respectively. Depending on cooperation, rats and mice were given low doses of the anaesthetic Hypnorm prior to i.v. injection. Changes in activity, measured in response to physical stimulation, were closely monitored immediately after injection as well as 30 minutes, 2 hours, 4 hours, and once daily after the first day for a total of 3 days. Total body weight was measured immediately before injections and once daily in the following days for a total of 3 days. Body temperatures were measured in triplicate, using a handheld infrared thermometer, immediately before injection as well as 30 minutes, 2 hours, 4 hours, and once daily after the first day for a total of 3 days.

[0221] Results

[0222] A range of 1×10⁸-3×10⁹ cfu of auxotrophic and invasive EcNΔdapA+pGB3 were injected i.v. into healthy CB6F1 mice and total body weight as well as body temperature was measured for 3 days p.i. Bacterial doses of up to 3×10⁹ cfu were tolerated with an initial drop in body weight after 1 day before slight recovery of body weights after 2 days when no statistically significant differences were observed compared to day 0 (FIG. 19a). The lowest temperature reached at this dose was 35.3° C. after 3 days compared to 37° C. before injection which was well within normal range (FIG. 19b). The body weight and temperature measurements on day 3 were unfortunately missed for the 3×10⁹ dose. Yet, visual inspection of these mice for up to 5 days p.i. indicated no further toxicity and these mice were as active in their foraging and grooming behavior as the mice receiving lower injection doses (Data not shown). Based on reference values for total blood volume and number of lymphocytes in mice, the highest tolerated dose of 3×10⁹ cfu translated to a 1027 MOI of bacteria to lymphocytes (Stemcell technologies Document #28048, National Centre for the Replacement Refinement & Reduction of Animals in Research). The same bacterial delivery vectors were also injected i.v. into female, 6-8 weeks old Sprague Dawley rats to determine the highest tolerated dose. Rats were injected with 3×10⁹-3×10¹⁰ cfu of auxotrophic and invasive EcNΔdapA+pGB3. Doses of up to 1×10¹⁰ cfu were well tolerated by rats with both total body weight and temperature recovering completely to baseline levels after 3 days (FIG. 19c&d). Based on rat reference values for lymphocyte numbers and blood volume, the highest dose of 1×10¹⁰ cfu/injection translated into an MOI of around 97 (Taconic, National Centre for the Replacement Refinement & Reduction of Animals in Research.

[0223] In conclusion, both rats and mice tolerated high doses of i.v. injections with auxotrophic and invasive bacterial delivery vectors. While rats tolerated higher cfu/injection, mice tolerated higher MOIs. Thus, this study successfully showed for the first time that engineered bacterial delivery vectors can be safely injected into the blood stream of rodents which provides a solid foundation for further in vivo investigations into the functionality and efficacy of therapeutic molecule transfer to T cells in vivo.

### Example 16 Use of Recombinant Bacteria-Mediated Delivery Vectors Expressing Invasin and Listeriolysin O to Transfer Genes into a Hela Cell Line

[0224] Engineered E. coli strain (EcN-ΔdapA) containing a combination of an inv-hly expression plasmid (pSQ11) and a reporter plasmid (PL0017; Example 1) containing a mCherry gene encoding monomeric red fluorescent protein (mCherry) was used to infect Hela cells and shown to additionally transfer and express the mCherry reporter gene in infected Hela cells.

[0225] Methods

[0226] HeLa cells were seeded in a 6-well plate at 1×10⁵ cells/well and allowed to attach overnight. Monolayers where then infected with cells of engineered E. coli EcNΔdapA pSQ11PL0017, or EcNΔdapA pSQ11 strains (Table 4) at an MOI of 500 for 1 hour at 37° C. and 5% CO₂. After the infection, monolayers were washed trice with PBS to remove bacteria and incubated in fresh DMEM media supplemented with 10% FCS and Ciprofloxacin (10 μg/ml) inside an Incucyte live cell imager at 37° C. and 5% CO₂.

[0227] Results

[0228] HeLa cells were infected with cells of engineered E. coli strains expressing the two-component delivery system (inv-hly) encoded by pSQ11, and comprising a mCherry reporter plasmid. Since mCherry gene is operably linked to a promoter and terminator functional in mammalian cells, its expression can only occur once the gene is transferred to the mammalian Hela cells by the invading E. coli and escapes into the Hela cell intracellular space. Detection of mCherry fluorescence in the infected Hela cells demonstrated that the E. coli cells invaded the Hela cells and transferred the mCherry reporter plasmid, while being absent in uninfected Hela cells or Hela cells infected with cells of E. coli strain pSQ11 plasmid (not shown). Expression of the transferred mCherry gene was first detected as fluorescence in the Hela cells after approximately 24 hours (FIG. 20).

### REFERENCES

[0229] Allenspach, E., Rawlings, D. J., & Scharenberg, A. M. (1993). X-Linked Severe Combined Immunodeficiency. In GeneReviews®. Retrieved from http://www.ncbi.nlm.nih.gov/pubmed/20301584
[0230] Anderson. C., 2006. Promoters/Catalog/Anderson—parts.igem.org. Regist Stand Parts. http://parts.igem.org/Promoters/Catalog/Anderson. Lee-Chang, C. (2013). Inhibition of Lung Metastasis by Chemokine CCL17-mediated In Vivo Silencing of Genes in CCR4+ Tregs. Journal of Immunotherapy, 36(4), 258-267.
[0231] Bloemberg, D., Nguyen, T., MacLean, S., Zafer, A., Gadoury, C., Gurnani, K., Doi, Y., Oki, S., Ozawa, T., Hohjoh, H., Miyake, S., & Yamamura, T. (2008). Orphan nuclear receptor NR4A2 expressed in T cells from multiple sclerosis mediates production of inflammatory cytokines. Proceedings of the National Academy of Sciences of the United States of America, 105(24), 8381-8386.
[0232] Bonde M T, Pedersen M, Klausen M S, Jensen S I, Wulff T, Harrison S, Nielsen A T, Herrg∪rd M J, Sommer M O A. 2016. Predictable tuning of protein expression in bacteria. Nat Methods 13:233-236.
[0233] Chen Y et al., 2019 Immunotherapy Deriving from CAR-T Cell Treatment in Autoimmune Diseases: J Immunology Research. Article ID 5727516 doi.org/10.1155/2019/5727516].
[0234] Chowdhury S, Castro S, Coker C, Hinchliffe T E, Arpaia N, Danino T, Tsang M, Gantchev J, Ghazawi F M, Litvinov I V. 2017. Protocol for adhesion and immunostaining of lymphocytes and other non-adherent cells in culture. Biotechniques 63:230-233.
[0235] Courvalin et al 1995: Transfert De Genes Des Bacteries Aux Cellules De Mammiferes. Comptes Rendus de l'Academie Des Sciences—Serie III, 318(12), 1207-1212. Retrieved from ncbi.nlm.nih.gov/pubmed/8745635
[0236] Croxen, M. A., Law, R. J., Scholz, R., Keeney, K. M., Wlodarska, M., & Finlay, B. B. (2013, October 1). Recent advances in understanding enteric pathogenic Escherichia coli. Clinical Microbiology Reviews, Vol. 26, pp. 822-880. https://doi.org/10.1128/CMR.00022-13
[0237] Dudda, J. C., Salaun, B., Ji, Y., Palmer, D. C., Monnot, G. C., Merck, E., Romero, P. (2013). MicroRNA-155 is required for effector cd8+t cell responses to virus infection and cancer. Immunity, 38(4), 742-753
[0238] Ebina, H., Misawa, N., Kanemura, Y., & Koyanagi, Y. (2013). Harnessing the CRISPR/Cas9 system to disrupt latent HIV-1 provirus. Scientific Reports, 3. https://doi.org/10.1038/srep02510
[0239] Flinn, A. M., & Gennery, A. R. (2018, April 24). Adenosine deaminase deficiency: A review. Orphanet Journal of Rare Diseases, Vol. 13, p. 65.
[0240] Fraietta, J. A., Lacey, S. F., Orlando, E. J., Pruteanu-Malinici, I., Gohil, M., Lundh, S., Melenhorst, J. J. (2018). Determinants of response and resistance to CD19 chimeric antigen receptor (CAR) T cell therapy of chronic lymphocytic leukemia. Nature Medicine, 24(5), 563-571
[0241] Freeley, M., & Long, A. (2013). Advances in siRNA delivery to T-cells: Potential clinical applications for inflammatory disease, cancer and infection. Biochemical Journal, Vol. 455, pp. 133-147
[0242] Gómez-Valadés, A. G., Llamas, M., Blanch, S., Perales, J. C., Roman, J., Gómez-Casajús, L., & Mascaró, C. (2012). Specific Jak3 downregulation in lymphocytes impairs y c cytokine signal transduction and alleviates antigen-driven inflammation in vivo. Molecular Therapy—Nucleic Acids, 1(9), e42.
[0243] Gupta, R., & Brunak, S. (2002). Prediction of glycosylation across the human proteome and the correlation to protein function. Pac Symp Biocomput, 310-322.
[0244] Gust, T. C., Neubrandt, L., Merz, C., Asadullah, K., ZOgel, U., & von Bonin, A. (2008). RNA interference-mediated gene silencing in murine T cells: In vitro and in vivo validation of proinflammatory target genes. Cell Communication and Signaling, 6(1), 3.
[0245] Hinterleitner, R., Gruber, T., Pfeifhofer-Obermair, C., Lutz-Nicoladoni, C., Tzankov, A., Schuster, M., Baier, G. (2012). Adoptive Transfer of siRNA Cblb-Silenced CD8+ T Lymphocytes Augments Tumor Vaccine Efficacy in a B16 Melanoma Model. PLoS ONE, 7(9), e44295.
[0246] Hou, P., Chen, S., Wang, S., Yu, X., Chen, Y., Jiang, M., Guo, D. (2015). Genome editing of CXCR4 by CRISPR/cas9 confers cells resistant to HIV-1 infection. Scientific Reports, 5. https://doi.org/10.1038/srep15577
[0247] Jorgensen, S. B., O'Neill, H. M., Sylow, L., Honeyman, J., Hewitt, K. A., Palanivel, R., Steinberg, G. R. (2013). Deletion of skeletal muscle SOCS3 prevents insulin resistance in obesity. Diabetes, 62(1), 56-64
[0248] Kuhn, C., & Weiner, H. L. (2016). Therapeutic anti-CD3 monoclonal antibodies: from bench to bedside. Immunotherapy, 8(8), 889-906
[0249] Kumar, P., Ban, H. S., Kim, S. S., Wu, H., Pearson, T., Greiner, D. L., Shankar, P. (2008). T Cell-Specific siRNA Delivery Suppresses HIV-1 Infection in Humanized Mice. Cell, 134(4), 577-586.
[0250] Lee, J., Yun, K. S., Choi, C. S., Shin, S. H., Ban, H. S., Rhim, T., Lee, K. Y. (2012). T cell-specific siRNA delivery using antibody-conjugated chitosan nanoparticles. Bioconjugate Chemistry, 23(6), 1174-1180.
[0251] Lee et al 2018: Modulatory upregulation of an insulin peptide gene by different pathogens in C. Elegans. Virulence, 9(1), 648-658. doi.org/10.1080/21505594.2018.1433969.
[0252] Li, H., Xu, H., Zhou, Y., Zhang, J., Long, C., Li, S., . . . Shao, F. (2007). The phosphothreonine lyase activity of a bacterial type III effector family. Science, 315(5814), 1000-1003. https://doi.org/10.1126/science.1138960
[0253] Li, R., Helbig, L., Fu, J., Bian, X., Herrmann, J., Baumann, M., Zhang, Y. (2019). Expressing cytotoxic compounds in Escherichia coli Nissle 1917 for tumor-targeting therapy. Research in Microbiology, 170(2), 74-79
[0254] Liao, H. K., Gu, Y., Diaz, A., Marlett, J., Takahashi, Y., Li, M., Belmonte, J. C. I. (2015). Use of the CRISPR/Cas9 system as an intracellular defense against HIV-1 infection in human cells. Nature Communications, 6. https://doi.org/10.1038/ncomms7413
[0255] Lovett-Racke, A. E., Rocchini, A. E., Choy, J., Northrop, S. C., Hussain, R. Z., Ratts, R. B., . . . Racke, M. K. (2004). Silencing T-bet defines a critical role in the differentiation of autoreactive T lymphocytes. Immunity, 21(5), 719-731.
[0256] Luheshi, N. M., Rothwell, N. J., & Brough, D. (2009). Dual functionality of interleukin-1 family cytokines: Implications for anti-interleukin-1 therapy. British Journal of Pharmacology, Vol. 157, pp. 1318-1329.
[0257] Lund, A. M., Kildegaard, H. F., Petersen, M. B. K., Rank, J., Hansen, B. G., Andersen, M. R., & Mortensen, U. H. (2014). A Versatile System for USER Cloning-Based Assembly of Expression Vectors for Mammalian Cell Engineering. PLoS ONE, 9(5), e96693. https://doi.org/10.1371/journal.pone.0096693 MacKay, M., Afshinnekoo, E., Rub, J., Hassan, C., Khunte, M., Baskaran, N., Mason, C.
[0258] E. (2020). The therapeutic landscape for cells engineered with chimeric antigen receptors. Nature Biotechnology, 38(2), 233-244
[0259] Mamonkin, M., Rouce, R. H., Tashiro, H., & Brenner, M. K. (2015). A T-cell-directed chimeric antigen receptor for the selective treatment of T-cell malignancies. Blood, 126(8), 983-992
[0260] Mattock, E., & Blocker, A. J. (2017). How do the virulence factors of shigella work together to cause disease? Frontiers in Cellular and Infection Microbiology, 7(MAR). https://doi.org/10.3389/fcimb.2017.00064
[0261] McComb, S. (2020). A High-Throughput Method for Characterizing Novel Chimeric Antigen Receptors in Jurkat Cells. Molecular Therapy—Methods and Clinical Development, 16, 238-254.
[0262] Moriwaki, A., Inoue, H., Nakano, T., Matsunaga, Y., Matsuno, Y., Matsumoto, T., Nakanishi, Y. (2011). T cell treatment with small interfering RNA for suppressor of cytokine signaling 3 modulates allergic airway responses in a murine model of asthma. American Journal of Respiratory Cell and Molecular Biology, 44(4), 448-455.
[0263] Müller, H. J., & Boos, J. (1998) Use of L-asparaginase in childhood ALL. Critical Reviews in Oncology/Hematology, Vol. 28, pp. 97-113
[0264] Nadler, C., Baruch, K., Kobi, S., Mills, E., Haviv, G., Farago, M., Rosenshine, I. (2010). The Type III Secretion Effector NleE Inhibits NF-κB Activation. PLoS Pathogens, 6(1), e1000743; https://doi.org/10.1371/journal.ppat.1000743
[0265] Novina, C. D., Murray, M. F., Dykxhoorn, D. M., Beresford, P. J., Riess, J., Lee, S. K., Sharp, P. A. (2002). siRNA-directed inhibition of HIV-1 infection. Nature Medicine, 8(7), 681-686. https://doi.org/10.1038/nm725
[0266] Pallandre, J.-R., Brillard, E., Crehange, G., Radlovic, A., Remy-Martin, J.-P., Saas, P., Borg, C. (2007). Role of STAT3 in CD4+CD25+FOXP3+Regulatory Lymphocyte Generation: Implications in Graft-versus-Host Disease and Antitumor Immunity. The Journal of Immunology, 179(11), 7593-7604.
[0267] Pettersen, E. F., Goddard, T. D., Huang, C. C., Couch, G. S., Greenblatt, D. M., Meng, E. C., & Ferrin, T. E. (2004). UCSF Chimera—A visualization system for exploratory research and analysis. Journal of Computational Chemistry, 25(13), 1605-1612. https://doi.org/10.1002/jcc.20084
[0268] Pollock, G. L., Oates, C. V. L., Giogha, C., Lung, T. W. F., Ong, S. Y., Pearson, J. S., & Hartland, E. L. (2017). Distinct roles of the antiapoptotic effectors NleB and NleF from enteropathogenic Escherichia coli. Infection and Immunity, 85(4).
[0269] Punj, V., Bhattacharyya, S., Saint-Dic, D., Vasu, C., Cunningham, E. A., Graves, J., Das Gupta, T. K. (2004). Bacterial cupredoxin azurin as an inducer of apoptosis and regression in human breast cancer. Oncogene, 23(13), 2367-2378
[0270] Qi, C., Li, D., Jiang, X., Jia, X., Lu, L., Wang, Y., Wei, M. (2018). Inducing CCR5 Δ32/A32 Homozygotes in the Human Jurkat CD4+Cell Line and Primary CD4+Cells by CRISPR-Cas9 Genome-Editing Technology. Molecular Therapy—Nucleic Acids, 12, 267-274.
[0271] Reisch C R, Prather K L J. 2015. The no-SCAR (Scarless Cas9 Assisted Recombineering) system for genome editing in Escherichia coli. Sci Rep 5.
[0272] Roberts, T. M., Rudolf, F., Meyer, A., Pellaux, R., Whitehead, E., Panke, S., & Held, M. (2016). Identification and Characterisation of a pH-stable GFP. Scientific Reports, 6(1), 1-9. https://doi.org/10.1038/srep28166
[0273] Sails H M. 2011. The ribosome binding site calculator, p. 19-42. In Methods in Enzymology. Academic Press Inc.
[0274] Sarkar, A., Bale, S., Behrens, A. J., Kumar, S., Sharma, S. K., De Val, N., . . . Wilson, I. A. (2018). Structure of a cleavage-independent HIV Env recapitulates the glycoprotein architecture of the native cleaved trimer. Nature Communications, 9(1), 1-14. https://doi.org/10.1038/s41467-018-04272-y
[0275] Self, M., Einsele, H., & Löffler, J. (2019) CAR T Cells Beyond Cancer: Hope for Immunomodulatory Therapy of Infectious Diseases. Frontiers in Immunology, Vol. 10, p. 2711
[0276] Sharma, S. K., deVal, N., Bale, S., Guenaga, J., Tran, K., Feng, Y., . . . Wyatt, R. T. (2015). Cleavage-Independent HIV-1 Env Trimers Engineered as Soluble Native Spike Mimetics for Vaccine Design. Cell Reports, 11(4), 539-550. https://doi. org/10.1016/j.celrep.2015.03.047
[0277] Silva-Rocha et al 2013: The Standard European Vector Architecture (SEVA): A coherent platform for the analysis and deployment of complex prokaryotic phenotypes. Nucleic Acids Research, 41(D1), D666. doi.org/10.1093/nar/gks1119
[0278] Su, S., et al., (2016). CRISPR-Cas9 mediated efficient PD-1 disruption on human primary T cells from cancer patients. Scientific Reports, 6(1), 1-14. https://doi.org/10.1038/srep20070
[0279] Takahashi, H., Inoue, J., Sakaguchi, K., Takagi, M., Mizutani, S., & Inazawa, J. (2017). Autophagy is required for cell survival under L-asparaginase-induced metabolic stress in acute lymphoblastic leukemia cells. Oncogene, 36(30), 4267-4276
[0280] Tesniere, A., Abermil, N., Schlemmer, F., Casares, N., Kepp, O., Pequignot, M., Kroemer, G. (2010). In vivo depletion of T lymphocyte-specific transcription factors by RNA interference. Cell Cycle, 9(14), 2902-2907
[0281] Tsaprouni, L. G., Ito, K., Adcock, I. M., & Punchard, N. (2007). Suppression of lipopolysaccharide- and tumour necrosis factor-α-induced interleukin (IL)-8 expression by glucocorticoids involves changes in IL-8 promoter acetylation. Clinical and Experimental Immunology, 150(1), 151-157.
[0282] Uribe-Quero, E., & Rosales, C. (2017, October 24). Control of phagocytosis by microbial pathogens. Frontiers in Immunology, Vol. 8, p. 24. https://doi.org/10.3389/fimmu.2017.01368
[0283] Wang, Z., et al., (2016). CRISPR/Cas9-Derived Mutations Both Inhibit HIV-1 Replication and Accelerate Viral Escape. Cell Reports, 15(3), 481-489
[0284] Wei, P., et al., (2012) Bacterial virulence proteins as tools to rewire kinase pathways in yeast and immune cells. Nature, Vol. 488, pp. 384-388
[0285] Wilton et al 2018: A New Suite of Plasmid Vectors for Fluorescence-Based Imaging of Root Colonizing Pseudomonads. Front Plant Sci. 2018 Feb. 1; 8:2242. doi: 10.3389/fpls.2017.02242. eCollection 2017. 10.3389/fpls.2017.02242 PubMed 29449848 (Addgene #111254)
[0286] Yang, S. C., Hung, C. F., Aljuffali, I. A., & Fang, J. Y. (2015, December 1). The roles of the virulence factor IpaB in Shigella spp. in the escape from immune cells and invasion of epithelial cells. Microbiological Research, Vol. 181, pp. 43-51. https://doi.org/10.1016/j.micres.2015.08.006
[0287] Zainuddin, H. S., Bai, Y., & Mansell, T. J. (2019). CRISPRQbased curing and analysis of metabolic burden of cryptic plasmids in Escherichia coli Nissle 1917. Engineering in Life Sciences, 19(6), 478-485. https:/doi.org/10.1002/elsc.201900003
[0288] Zheng, Y., Fang, Y. C., & Li, J. (2019). PD-L1 expression levels on tumor cells affect their immunosuppressive activity. Oncology Letters, 18(5), 5399-5407. https://doi.org/10.3892/ol.2019.10903
[0289] Zhu, W., et al., (2015). The CRISPR/Cas9 system inactivates latent HIV-1 proviral DNA. Retrovirology, 12(1). https://doi.org/10.1186/s12977-015-0150-z

The application's sequence listing, which the Patent Office published only in electronic form, follows.

SEQUENCE LISTING (290 sequences)

SEQ ID NO: 1 - DNA, 2958 bp, Yersinia pseudotuberculosis
  CDS (1)..(2958): Invasin from Yersinia pseudotuberculosis
atgatggttttccagccaatcagtgagtttctcttgataaggaatgcgggaatgtctatgtattttaataaaataatttcatttaatattatttcacgaatagttatttgtatctttttgatatgtggaatgttcatggctggggcttcagaaaaatatgatgctaacgcaccgcaacaggtccagccttattctgtctcttcatctgcatttgaaaatctccatcctaataatgaaatggagagttcaatcaatcccttttccgcatcggatacagaaagaaatgctgcaataatagatcgcgccaataaggagcaggagactgaagcggtgaataagatgataagcaccggggccaggttagctgcatcaggcagggcatctgatgttgctcactcaatggtgggcgatgcggttaatcaagaaatcaaacagtggttaaatcgattcggtacggctcaagttaatctgaattttgacaaaaatttttcgctaaaagaaagctctcttgattggctggctccttggtatgactctgcttcattcctcttttttagtcagttaggtattcgcaataaagacagccgcaacacacttaaccttggcgtcgggatacgtacattggagaacggttggctgtacggacttaatactttttatgataatgatttgaccggccacaaccaccgtatcggtcttggtgccgaggcctggaccgattatttacagttggctgccaatgggtattttcgcctcaatggatggcactcgtcgcgtgatttctccgactataaagagcgcccagccactgggggggatttgcgcgcgaatgcttatttacctgcactcccacaactgggggggaagttgatgtatgagcaatacaccggtgagcgtgttgctttatttggtaaagataatctgcaacgcaacccttatgccgtgactgccgggatcaattacacccccgtgcctctactcactgtcggggtagatcagcgtatggggaaaagcagtaagcatgaaacacagtggaacctccaaatgaactatcgcctgggcgagagttttcagtcgcaacttagcccttcagcggtggcaggaacacgtctactggcggagagccgctataaccttgtcgatcgtaacaataatatcgtgttggagtatcagaaacagcaggtggttaaactgacattatcgccagcaactatctccggcctgccgggtcaggtttatcaggtgaacgcacaagtacaaggggcatctgctgtaagggaaattgtctggagtgatgccgaactgattgccgctggcggcacattaacaccactgagtaccacacaattcaacttggttttaccgccttataaacgcacagcacaagtgagtcgggtaacggacgacctgacagccaacttttattcgcttagtgcgctcgcggttgatcaccaaggaaaccgatctaactcattcacattgagcgtcaccgttcagcagcctcagttgacattaacggcggccgtcattggtgatggcgcaccggctaatgggaaaactgcaatcaccgttgagttcaccgttgctgattttgaggggaaacccttagccgggcaggaggtggtgataaccaccaataatggtgcgctaccgaataaaatcacggaaaagacagatgcaaatggcgtcgcgcgcattgcattaaccaatacgacagatggcgtgacggtagtcacagcagaagtggaggggcaacggcaaagtgttgatacccactttgttaagggtactatcgcggcggataaatccactctggctgcggtaccgacatctatcatcgctgatggtctaatggcttcaaccatcacgttggagttgaaggatacctatggggacccgcaggctggcgcgaatgtggcttttgacacaaccttaggcaatatgggcgttatcacggatcacaatgacggcacttatagcgcaccattgaccagtaccacgttgggggtagcaacagtaacggtgaaagtggatggggctgcgttcagtgtgccgagtgtgacggttaatttcacggcagatcctattccagatgctggccgctccagtttcaccgtctccacaccggatatcttggctgatggcacgatgagttccacattatcctttgtccctgtcgataagaatggccattttatcagtgggatgcagggcttgagttttactcaaaacggtgtgccggtgagtattagccccattaccgagcagccagatagctataccgcgacggtggttgggaatagtgtcggtgatgtcacaatcacgccgcaggttgataccctgatactgagtacattgcagaaaaaaatatccctattcccggtacctacgctgaccggtattctggttaacgggcaaaatttcgctacggataaagggttcccgaaaacgatctttaaaaacgccacattccagttacagatggataacgatgttgctaataatactcagtatgagtggtcgtcgtcattcacacccaatgtatcggttaacgatcagggtcaggtgacgattacctaccaaacctatagcgaagtggctgtgacggcgaaaagtaaaaaattcccaagttattcggtgagttatcggttctacccaaatcggtggatatacgatggcggcagatcgctggtatccagtctcgaggccagcagacaatgccaaggttcagatatgtctgcggttcttgaatcctcacgtgcaaccaacggaacgcgtgcgcctgacgggacattgtggggcgagtgggggagcttgaccgcgtatagttctgattggcaatctggtgaatattgggtcaaaaagaccagcacggattttgaaaccatgaatatggacacaggcgcactgcaaccagggcctgcatacttggcgttcccgctctgtgcgctgtcaata

SEQ ID NO: 2 - protein, 986 aa, Yersinia pseudotuberculosis
MMVFQPISEFLLIRNAGMSMYFNKIISFNIISRIVICIFLICGMFMAGASEKYDANAPQQVQPYSVSSSAFENLHPNNEMESSINPFSASDTERNAAIIDRANKEQETEAVNKMISTGARLAASGRASDVAHSMVGDAVNQEIKQWLNRFGTAQVNLNFDKNFSLKESSLDWLAPWYDSASFLFFSQLGIRNKDSRNTLNLGVGIRTLENGWLYGLNTFYDNDLTGHNHRIGLGAEAWTDYLQLAANGYFRLNGWHSSRDFSDYKERPATGGDLRANAYLPALPQLGGKLMYEQYTGERVALFGKDNLQRNPYAVTAGINYTPVPLLTVGVDQRMGKSSKHETQWNLQMNYRLGESFQSQLSPSAVAGTRLLAESRYNLVDRNNNIVLEYQKQQVVKLTLSPATISGLPGQVYQVNAQVQGASAVREIVWSDAELIAAGGTLTPLSTTQFNLVLPPYKRTAQVSRVTDDLTANFYSLSALAVDHQGNRSNSFTLSVTVQQPQLTLTAAVIGDGAPANGKTAITVEFTVADFEGKPLAGQEVVITTNNGALPNKITEKTDANGVARIALTNTTDGVTVVTAEVEGQRQSVDTHFVKGTIAADKSTLAAVPTSIIADGLMASTITLELKDTYGDPQAGANVAFDTTLGNMGVITDHNDGTYSAPLTSTTLGVATVTVKVDGAAFSVPSVTVNFTADPIPDAGRSSFTVSTPDILADGTMSSTLSFVPVDKNGHFISGMQGLSFTQNGVPVSISPITEQPDSYTATVVGNSVGDVTITPQVDTLILSTLQKKISLFPVPTLTGILVNGQNFATDKGFPKTIFKNATFQLQMDNDVANNTQYEWSSSFTPNVSVNDQGQVTITYQTYSEVAVTAKSKKFPSYSVSYRFYPNRWIYDGGRSLVSSLEASRQCQGSDMSAVLESSRATNGTRAPDGTLWGEWGSLTAYSSDWQSGEYWVKKTSTDFETMNMDTGALQPGPAYLAFPLCALSI

SEQ ID NO: 3 - DNA, 2877 bp, Yersinia pseudotuberculosis
  CDS (1)..(2877): Invasion with E. coli signal peptide OmpA
atgaaaaaaaccgcgattgcgattgcggtggcgctggcgggctttgcgaccgtggcgcaggcgagcgagaaatacgatgcaaacgcaccgcaacaggttcaaccttattccgtgtcttcctcagctttcgagaatctgcatcctaacaatgaaatggagtcctctatcaatcctttttccgcgtcggacacagagcgtaacgccgcgatcatcgatcgcgcaaacaaggaacaggagactgaggccgtgaataagatgatctcaaccggggcacgcttggctgcttcgggccgtgcttctgatgtggcgcactcgatggttggggacgcggttaatcaagagattaagcagtggttaaatcgtttcggtacggcgcaggttaatcttaatttcgacaaaaatttctctctgaaggagtcatctctggactggttggctccatggtacgattcggcgtcattcctttttttctcccaactgggaatccgcaataaagactcacgcaacacgcttaacttaggggtggggatccgcacactggagaatggctggctttacggcttaaatacgttttatgataacgacctgaccggccacaatcatcgcatcggtttaggggcagaggcttggactgattatttacaactggcagcgaatgggtacttccgccttaacggatggcacagctctcgtgacttcagcgactataaggagcgtccggctacgggaggagaccttcgtgctaatgcctaccttccggcacttccacagctgggcggaaaacttatgtatgaacaatataccggagagcgtgtcgcacttttcggtaaagacaacctgcaacgtaacccatatgctgtaaccgcgggcatcaactacacaccagtgccattgttaactgtcggggtggatcaacgcatgggcaagagttcaaagcatgagacacaatggaaccttcaaatgaactatcgcttgggtgagtcttttcaaagtcaactgagtccatctgccgtagctggcacacgtttattagctgaatcacgttacaatttagtcgaccgtaataataatatcgtcttggaatatcaaaagcaacaagttgttaaactgacgctttcgcccgctacgatcagtggtttgcccggccaagtctatcaagtgaacgcgcaagtacagggtgcgagcgccgtgcgcgagattgtatggagtgacgccgagttaatcgctgcggggggtacgctgactccgttaagcactacacagttcaacttagtgctgcctccgtacaaacgcacggctcaggtcagccgcgtaacggacgatttaactgctaacttctactcattgtccgctcttgctgtcgaccaccagggtaatcgctcgaactctttcactttgtcagttacggtccaacaaccacaattgacattaactgccgccgtgattggtgacggtgcccctgccaacgggaagaccgcgattactgtagagttcacggttgccgactttgagggcaaacctctggcggggcaggaggtggttattaccacaaataacggtgcgcttcccaacaaaatcacggagaaaactgatgcaaacggggtggcacgtatcgcacttaccaacacgactgacggagtgacagtggttaccgctgaggtagaaggtcaacgtcaaagtgtggacacacactttgtcaagggcacgatcgcggccgataaatcgacattggcggcagttccaacgtcaatcatcgccgatggtttgatggcatcgactattactttagagcttaaagacacctacggagacccgcaagcaggcgctaacgtcgcatttgataccacattagggaatatgggagttattactgaccacaatgatgggacatattccgctcccttaacttctacaactcttggagtagcaacggtaaccgtgaaagtagacggggctgctttttcggtccctagcgtaaccgtaaattttacagcggacccaattccggacgcgggacgcagctcgttcactgtgagtactcccgacattctggctgatggcactatgagtagcactcttagttttgtgcccgtcgataaaaacgggcattttatctcaggaatgcaaggactttcatttacccagaacggagtgccggtctctatttctcctattacggagcaacccgattcctatactgccacggtggttgggaactcagtaggtgacgtaactatcaccccacaggtagatactttgatcttatcaaccttgcagaaaaagatttccttgttccccgtccccacattaacagggatcttggtaaacggccaaaatttcgcgacagataaagggtttccaaaaaccatcttcaagaatgcgactttccagctgcagatggataacgacgtagctaataatacacaatacgaatggtcctcatccttcactcccaatgtttcagtcaatgaccagggccaggttacaattacctatcagacctactccgaagttgcggtgacggcaaaaagcaagaagttcccttcgtactccgtctcgtaccgcttttaccccaaccgttggatttacgatgggggccgttctcttgtgtcttcgttggaggcgtctcgccaatgccaaggttctgatatgtcagccgtattagagagctcacgcgcgacgaacgggactcgtgcgccagacggcacgctgtggggagaatgggggagtctgacagcatactcgtccgattggcagagtggtgaatattgggtcaaaaaaacctcgaccgatttcgaaacgatgaacatggataccggagcgctgcaaccgggcccagcatatctggcattccccttgtgtgccttatccatctaa

SEQ ID NO: 4 - protein, 958 aa, Yersinia pseudotuberculosis
MKKTAIAIAVALAGFATVAQASEKYDANAPQQVQPYSVSSSAFENLHPNNEMESSINPFSASDTERNAAIIDRANKEQETEAVNKMISTGARLAASGRASDVAHSMVGDAVNQEIKQWLNRFGTAQVNLNFDKNFSLKESSLDWLAPWYDSASFLFFSQLGIRNKDSRNTLNLGVGIRTLENGWLYGLNTFYDNDLTGHNHRIGLGAEAWTDYLQLAANGYFRLNGWHSSRDFSDYKERPATGGDLRANAYLPALPQLGGKLMYEQYTGERVALFGKDNLQRNPYAVTAGINYTPVPLLTVGVDQRMGKSSKHETQWNLQMNYRLGESFQSQLSPSAVAGTRLLAESRYNLVDRNNNIVLEYQKQQVVKLTLSPATISGLPGQVYQVNAQVQGASAVREIVWSDAELIAAGGTLTPLSTTQFNLVLPPYKRTAQVSRVTDDLTANFYSLSALAVDHQGNRSNSFTLSVTVQQPQLTLTAAVIGDGAPANGKTAITVEFTVADFEGKPLAGQEVVITTNNGALPNKITEKTDANGVARIALTNTTDGVTVVTAEVEGQRQSVDTHFVKGTIAADKSTLAAVPTSIIADGLMASTITLELKDTYGDPQAGANVAFDTTLGNMGVITDHNDGTYSAPLTSTTLGVATVTVKVDGAAFSVPSVTVNFTADPIPDAGRSSFTVSTPDILADGTMSSTLSFVPVDKNGHFISGMQGLSFTQNGVPVSISPITEQPDSYTATVVGNSVGDVTITPQVDTLILSTLQKKISLFPVPTLTGILVNGQNFATDKGFPKTIFKNATFQLQMDNDVANNTQYEWSSSFTPNVSVNDQGQVTITYQTYSEVAVTAKSKKFPSYSVSYRFYPNRWIYDGGRSLVSSLEASRQCQGSDMSAVLESSRATNGTRAPDGTLWGEWGSLTAYSSDWQSGEYWVKKTSTDFETMNMDTGALQPGPAYLAFPLCALSI

SEQ ID NO: 5 - DNA, 1590 bp, Listeria monocytogenes
  CDS (1)..(1590): listeriolysin gene from Listeria monocytogenes
atgaaaaaaataatgctagtttttattacacttatattagttagtctaccaattgcgcaacaaactgaagcaaaggatgcatctgcattcaataaagaaaattcaatttcatccatggcaccaccagcatctccgcctgcaagtcctaagacgccaatcgaaaagaaacacgcggatgaaatcgataagtatatacaaggattggattacaataaaaacaatgtattagtataccacggagatgcagtgacaaatgtgccgccaagaaaaggttacaaagatggaaatgaatatattgttgtggagaaaaagaagaaatccatcaatcaaaataatgcagacattcaagttgtgaatgcaatttcgagcctaacctatccaggtgctctcgtaaaagcgaattcggaattagtagaaaatcaaccagatgttctccctgtaaaacgtgattcattaacactcagcattgatttgccaggtatgactaatcaagacaataaaatcgttgtaaaaaatgccactaaatcaaacgttaacaacgcagtaaatacattagtggaaagatggaatgaaaaatatgctcaagcttatccaaatgtaagtgcaaaaattgattatgatgacgaaatggcttacagtgaatcacaattaattgcgaaatttggtacagcatttaaagctgtaaataatagcttgaatgtaaacttcggcgcaatcagtgaagggaaaatgcaagaagaagtcattagttttaaacaaatttactataacgtgaatgttaatgaacctacaagaccttccagatttttcggcaaagctgttactaaagagcagttgcaagcgcttggagtgaatgcagaaaatcctcctgcatatatctcaagtgtggcgtatggccgtcaagtttatttgaaattatcaactaattcccatagtactaaagtaaaagctgcttttgatgctgccgtaagcggaaaatctgtctcaggtgatgtagaactaacaaatatcatcaaaaattcttccttcaaagccgtaatttacggaggttccgcaaaagatgaagttcaaatcatcgacggcaacctcggagacttacgcgatattttgaaaaaaggcgctacttttaatcgagaaacaccaggagttcccattgcttatacaacaaacttcctaaaagacaatgaattagctgttattaaaaacaactcagaatatattgaaacaacttcaaaagcttatacagatggaaaaattaacatcgatcactctggaggatacgttgctcaattcaacatttcttgggatgaagtaaattatgatcctgaaggtaacgaaattgttcaacataaaaactggagcgaaaacaataaaagcaagctagctcatttcacatcgtccatctatttgccaggtaacgcgagaaatattaatgtttacgctaaagaatgcactggtttagcttgggaatggtggagaacggtaattgatgaccggaacttaccacttgtgaaaaatagaaatatctccatctggggcaccacgctttatccgaaatatagtaataaagtagataatccaatcgaataa

SEQ ID NO: 6 - protein, 529 aa, Listeria monocytogenes
MKKIMLVFITLILVSLPIAQQTEAKDASAFNKENSISSMAPPASPPASPKTPIEKKHADEIDKYIQGLDYNKNNVLVYHGDAVTNVPPRKGYKDGNEYIVVEKKKKSINQNNADIQVVNAISSLTYPGALVKANSELVENQPDVLPVKRDSLTLSIDLPGMTNQDNKIVVKNATKSNVNNAVNTLVERWNEKYAQAYPNVSAKIDYDDEMAYSESQLIAKFGTAFKAVNNSLNVNFGAISEGKMQEEVISFKQIYYNVNVNEPTRPSRFFGKAVTKEQLQALGVNAENPPAYISSVAYGRQVYLKLSTNSHSTKVKAAFDAAVSGKSVSGDVELTNIIKNSSFKAVIYGGSAKDEVQIIDGNLGDLRDILKKGATFNRETPGVPIAYTTNFLKDNELAVIKNNSEYIETTSKAYTDGKINIDHSGGYVAQFNISWDEVNYDPEGNEIVQHKNWSENNKSKLAHFTSSIYLPGNARNINVYAKECTGLAWEWWRTVIDDRNLPLVKNRNISIWGTTLYPKYSNKVDNPIE

SEQ ID NO: 7 - DNA, 1581 bp, Listeria monocytogenes
  CDS (1)..(1581): listeriolysin with E coli signal peptide pelB
atgaaatacctgctgccgaccgctgctgctggtctgctgctcctcgctgcccagccggcgatggccgatgcgtctgcctttaacaaagaaaatagtatttcctcgatggctcctccggcctcccctccagcttctccaaagacacctattgagaaaaaacatgctgacgaaattgataaatatatccaaggactggactataacaaaaacaatgttttggtgtatcacggcgacgccgtaacaaatgtgccgccacgcaaagggtataaggatggaaacgaatatattgtcgtggagaagaaaaaaaagtcgatcaaccaaaacaatgccgatattcaagtcgtgaacgcaatctctagtttgacgtatcctggagctttagttaaggccaattctgaattagtcgaaaatcaaccggatgtccttcctgtcaaacgcgacagtcttaccttatctattgatctgccgggcatgactaatcaagataataaaattgtcgtgaagaatgctactaagagtaacgtgaataacgcagtgaatacgcttgtcgagcgctggaacgagaaatatgcccaggcctatccaaacgtttccgccaagatcgattacgatgatgaaatggcgtatagtgagtcacagctgatcgcgaagtttggcaccgcctttaaagcagttaacaattcgttgaatgttaactttggagcaatttcggaaggcaagatgcaggaagaggttatctcgtttaagcaaatttattacaacgttaacgtcaatgagcctacacgtccttcacgcttctttggaaaagccgtcacgaaggagcagctgcaagctctgggagtaaacgctgaaaacccgcctgcctatattagttcggtagcatacgggcgtcaggtctacttgaagcttagcacaaactcacattctaccaaagtaaaggcggcattcgatgccgcggtgtcagggaaatcagtatcaggtgatgtagaattaacaaacattatcaaaaactctagctttaaggccgtcatttacggaggttctgcgaaggacgaagtgcagattatcgatggtaacttgggagatctgcgcgacatcttgaagaaaggagccacttttaatcgcgaaacgccgggggttccgatcgcgtatactaccaatttcctgaaagacaacgagttggcagtcattaaaaacaattccgagtacattgagacgacctcaaaagcgtatacggacgggaagatcaacattgaccactctgggggttatgtggcccaattcaacatcagctgggacgaggttaactatgaccctgaaggcaacgagattgtacagcataagaactggagtgaaaacaataaaagcaaattagcccattttacgtcgtcaatctatttaccaggtaacgctcgcaatatcaatgtttatgcgaaagagtgtaccggattggcgtgggaggcgtggcgcacagtcattgatgaccgtaacctgccgttggtaaagaaccgtaatatttcaatctgggggactaccctgtacccaaaatacagtaacaaggttgataatccgatcgaataa

SEQ ID NO: 8 - protein, 526 aa, Listeria monocytogenes
MKYLLPTAAAGLLLLAAQPAMADASAFNKENSISSMAPPASPPASPKTPIEKKHADEIDKYIQGLDYNKNNVLVYHGDAVTNVPPRKGYKDGNEYIVVEKKKKSINQNNADIQVVNAISSLTYPGALVKANSELVENQPDVLPVKRDSLTLSIDLPGMTNQDNKIVVKNATKSNVNNAVNTLVERWNEKYAQAYPNVSAKIDYDDEMAYSESQLIAKFGTAFKAVNNSLNVNFGAISEGKMQEEVISFKQIYYNVNVNEPTRPSRFFGKAVTKEQLQALGVNAENPPAYISSVAYGRQVYLKLSTNSHSTKVKAAFDAAVSGKSVSGDVELTNIIKNSSFKAVIYGGSAKDEVQIIDGNLGDLRDILKKGATFNRETPGVPIAYTTNFLKDNELAVIKNNSEYIETTSKAYTDGKINIDHSGGYVAQFNISWDEVNYDPEGNEIVQHKNWSENNKSKLAHFTSSIYLPGNARNINVYAKECTGLAWEAWRTVIDDRNLPLVKNRNISIWGTTLYPKYSNKVDNPIE

SEQ ID NO: 9 - DNA, 1971 bp, HIV-1
  CDS (1)..(1971): gp120 + gp41 fusion
agcgcggccgaaaacctgtgggttaccgtctactatggtgtaccggtttggaaagacgcggagaccacgctgttctgtgcatcagatgcaaaagcgtatgaaaccgagaagcataacgtttgggcgacccatgcctgcgtgccgacggatccgaatccgcaagagattcacttagagtcagtcaccgaagaatttaatatgtggaaaaataacatggttgagcagatgcacacggacatcatttctctgtgggaccagagcttaaagccgtgcgtaaagttgaccccactgtgtgttaccttgcaatgtaccggtgtgaccaataccattaccgacgatatgcgtggcgaactgaaaagctgtagcttttatatgaccaccgagctgcgcgacaagaaacagaaagtgtacagcctgttctaccgcctggacgtggtgcagattaacgagaaccaaggtacccggagcagtaatagcaataaagaatatcgtctgattaactgcacaacgtccgccatcacccaagcctgcccgaaagtgtcttttgaaccgatcccgatacactattgcgcgccggccggttttgcgatcctgaagtgcaaagataagaaatttagcggcacaggcccatgcccgagcgtttccaccgtgcagtgtacccacggaatcaagccggtagttagcacccaactgcttctggacggttctctagcggaggaagaggttatgattcgctccgaaagcataaccaacaacgcgaaaaatattttggttcaatttaacactccggttcaaatcacctgtacgcgtccgaactacaatacgcgtaaatccatcagaattggtccgggtcaggcgttctacgcgacgggcgacatcatcggcgacatccgccaagcgcactgcagcgtttccaaagcgacctggggcgaaacccttggtaaggttgttaagcagctgcgtaaacactttggcacgaacaccatcattcgtttcgctccgtcttcaggcggcgacttggaagttactacccacagcttcaattgcggtggcgagttcttttactgcagcacctctggcctgttcagttctacctggattagcaccacgtctgtgcagggttcaagctccactggctcaatcgatagcataaccttgccgtgccgtatcaagcaaattattaacatgtggcaacgtattggtcaagcaatgtatgcgccgcctattcagggtgttatccgttgtgttagcagcatcaccggtctgattctgacccgtgatggcggtagcacgacctccactactgaaacctttcgtccgggtggtggcgacatgcgtgataattggcgttccgaattgtacaagtacaaggttgtgaaaatagaaccactgggtgtggcgccgacgcgcgcgaaacgcggtggtggcggcgggtcgggtggtggcggcagcgcagtcggtattggtgcggtttttctgggcttcctgggtgcggcggggtccacaatgggtgctgcgtctatgaccctgaccgtccaggctcgtaacctgttgtccggcattgtgcagcagcagtccaatctgttgcgtgcgattgaggcacagcaacatctgctgaagctgaccgtgtggggtatcaagcaactgcaggcacgagtgttggcggtcgagcgttatctgagggaccagcaactgctgggcatctggggctgctcgggcaagctgatctgcaccacgaacgtgccgtggggctcctcttggagcaatcgtagcttaagcgagatctgggactcaatgacctggttgcaatgggataaagagattagcagctatacccaaattatctatggcctgttggaggaaagccagaatcagcaagaaaagaacgagcaggatctgctggcgctggacaagtgggcgtccctgtggaactggtttgatatcagcaactggctgtggtacattaagatc

SEQ ID NO: 10 - protein, 657 aa, HIV-1
SAAENLWVTVYYGVPVWKDAETTLFCASDAKAYETEKHNVWATHACVPTDPNPQEIHLESVTEEFNMWKNNMVEQMHTDIISLWDQSLKPCVKLTPLCVTLQCTGVTNTITDDMRGELKSCSFYMTTELRDKKQKVYSLFYRLDVVQINENQGTRSSNSNKEYRLINCTTSAITQACPKVSFEPIPIHYCAPAGFAILKCKDKKFSGTGPCPSVSTVQCTHGIKPVVSTQLLLDGSLAEEEVMIRSESITNNAKNILVQFNTPVQITCTRPNYNTRKSIRIGPGQAFYATGDIIGDIRQAHCSVSKATWGETLGKVVKQLRKHFGTNTIIRFAPSSGGDLEVTTHSFNCGGEFFYCSTSGLFSSTWISTTSVQGSSSTGSIDSITLPCRIKQIINMWQRIGQAMYAPPIQGVIRCVSSITGLILTRDGGSTTSTTETFRPGGGDMRDNWRSELYKYKVVKIEPLGVAPTRAKRGGGGGSGGGGSAVGIGAVFLGFLGAAGSTMGAASMTLTVQARNLLSGIVQQQSNLLRAIEAQQHLLKLTVWGIKQLQARVLAVERYLRDQQLLGIWGCSGKLICTTNVPWGSSWSNRSLSEIWDSMTWLQWDKEISSYTQIIYGLLEESQNQQEKNEQDLLALDKWASLWNWFDISNWLWYIKI

SEQ ID NO: 11 - DNA, 3549 bp, Shigella flexneri
  CDS (1)..(3549): inaC+ipaB+ipaC fsion
atgactctcgacaaggcgttggtgctgcgtacctgtgcaaataacatggccgatcactgcggccttatatggcccgcgtccggcacggtggaatccagatactggcagtcaaccaggcggcatgagaatggtctggtcggtttactgtggggcgctggaaccagcgcttttctaagcgtgcatgccgatgctcgatggattgtctgtgaagttgccgttgcagacatcatcagtctggaagagccgggaatggtcaagtttccgcgggccgaggtggttcatgtcggcgacaggatcagcgcgtcacacttcatttcggcacgtcaggccgaccctgcgtcaacgtcaacgtcaacgtcaacgtcaacgttaacgccaatgcctacggccatacccacgcccatgcctgcggtagcaagtgtcacgttaccggtggccgaacaggcccgtcatgaagtgttcgatgtcgcgtcggtcagcgcggctgccgccccagtaaacaccctgccggtgacgacgccgcagaatttgcagaccttcagactctgggacgggaagaggtacaggcaactggtcgccagaacgggtgagaacggtgttgaggccgacataccgtattacgtgaacgaagatgacgatattgtcgataaacccgacgaggacgatgactggatagaggtaaagatgcataatgtaagcaccacaaccactggttttcctcttgccaaaatattgacttccactgagcttggagacaatactatccaagctgcaaatgatgcagctaacaaattattttctcttacaattgctgatcttactgctaaccaaaatattaatacaactaatgcacactcaacttcaaatatattaatccctgaacttaaagcaccaaagtcattaaatgcaagttcccaactaacgcttttaattggaaaccttattcaaatactcggtgaaaaatctttaactgcattaacaaataaaattactgcttggaagtcccagcaacaggcaagacagcaaaaaaacctagaattctccgataaaattaacactcttctatctgaaactgaaggactaaccagagactatgaaaaacaaattaataaactaaaaaacgcagattctaaaataaaagacctagaaaataaaattaaccaaattcaaacaagattatccgaactcgatccagagtcaccagaaaagaaaaaattaagccgggaagaaatacaactcactatcaaaaaagacgcagcagttaaagacaggacattgattgagcagaaaaccctgtcaattcatagcaaacttacagataaatcaatgcaactcgaaaaagaaatagactctttttctgcattttcaaacacagcatctgctgaacagctatcaacccagcagaaatcattaaccggacttgccagtgttactcaattgatggcaacctttattcaactagttggaaaaaataatgaagaatctttaaaaaatgatctggctctattccagtctctccaagaatcaagaaaaactgaaatggagagaaaatctgatgagtatgctgctgaagtacgtaaagcagaagaactcaacagagtaatgggttgtgttgggaaaatacttggggcacttttaactatcgttagtgttgttgcagcagctttttctggaggagcctctctagcactggcagctgttggtttagctcttatggttacggatgctatagtacaagcagcgaccggcaattccttcatggaacaagccctgaatccgatcatgaaagcagtcattgaacccttaatcaaactcctttcagatgcatttacaaaaatgctcgaaggcttgggcgtcgactcgaaaaaagccaaaatgattggctctattctgggggcaatcgcaggcgctcttgtcctagttgcagcagtcgttctcgtagccactgttggtaaacaggcagcagcaaaacttgcagaaaatattggcaaaataataggtaaaaccctcacagaccttataccaaagtttctcaagaatttttcttctcaactggacgatttaatcactaatgctgttgccagattaaataaatttcttggtgcagcgggtgatgaagtaatatccaaacaaattatttccacccatttaaaccaagcagttttattaggagaaagtgttaactctgccacacaagcgggaggaagtgtcgcttctgctgttttccagaacagcgcgtcgacaaatctagcagacctgacattatcgaaatatcaagttgaacaactgtcaaaatatatcagtgaagcaatagaaaaattcggccaattgcaggaagtaattgcagatctattagcctcaatgtccaactctcaggctaatagaactgatgttgcaaaagcaattttgcaacaaactactgctggtggtggcggcgggtcgggtggtggcggcagcatggaaattcaaaacacaaaaccaacccagactttatatacagatatatccacaaaacaaactcaaagttcttccgaaacacaaaaatcacaaaattatcagcagattgcagcgcatattccacttaatgtcggtaaaaatcccgtattaacaaccacattaaatgatgatcaacttttaaagttatcagagcaggttcagcatgattcagaaatcattgctcgccttactgacaaaaagatgaaagatctttcagagatgagtcacacccttactccagagaacactctggatatttccagtctttcttctaatgctgtttctttaattattagtgtagccgttctactttctgctctccgcactgcagaaactaaattgggctctcaattgtcattgattgcgttcgatgctacaaaatcagctgcagagaacattgttcggcaaggcctggcagccctatcatcaagcattactggagcagtcacacaagtaggtataacgggtatcggtgccaaaaaaacgcattcagggattagcgaccaaaaaggagccttaagaaagaaccttgccactgctcaatctcttgaaaaagagcttgcaggttctaaattagggttaaataaacaaatagatacaaatatcacctcaccacaaactaactctagcacaaaatttttaggtaaaaataaactggcgccagataatatatccctgtcaactgaacataaaacttctcttagttctcccgatatttctttgcaggataaaattgacacccagagaagaacttacgagctcaataccctttctgcgcagcaaaaacaaaacattggccgtgcaacaatggaaacatcagccgttgctggtaatatatccacatcaggagggcgttatgcatctgctcttgaagaagaagaacaactaatcagtcaggccagcagtaaacaagcagaggaagcatcccaagtatctaaagaagcatcccaagcgacaaatcaattaatacaaaaattattgaatataattgacagcatcaaccaatcaaagaattcggcagccagtcagattgctggtaacattcgagcttaa

SEQ ID NO: 12 - protein, 1182 aa, Shigella flexneri
MTLDKALVLRTCANNMADHCGLIWPASGTVESRYWQSTRRHENGLVGLLWGAGTSAFLSVHADARWIVCEVAVADIISLEEPGMVKFPRAEVVHVGDRISASHFISARQADPASTSTSTSTSTLTPMPTAIPTPMPAVASVTLPVAEQARHEVFDVASVSAAAAPVNTLPVTTPQNLQTFRLWDGKRYRQLVARTGENGVEADIPYYVNEDDDIVDKPDEDDDWIEVKMHNVSTTTTGFPLAKILTSTELGDNTIQAANDAANKLFSLTIADLTANQNINTTNAHSTSNILIPELKAPKSLNASSQLTLLIGNLIQILGEKSLTALTNKITAWKSQQQARQQKNLEFSDKINTLLSETEGLTRDYEKQINKLKNADSKIKDLENKINQIQTRLSELDPESPEKKKLSREEIQLTIKKDAAVKDRTLIEQKTLSIHSKLTDKSMQLEKEIDSFSAFSNTASAEQLSTQQKSLTGLASVTQLMATFIQLVGKNNEESLKNDLALFQSLQESRKTEMERKSDEYAAEVRKAEELNRVMGCVGKILGALLTIVSVVAAAFSGGASLALAAVGLALMVTDAIVQAATGNSFMEQALNPIMKAVIEPLIKLLSDAFTKMLEGLGVDSKKAKMIGSILGAIAGALVLVAAVVLVATVGKQAAAKLAENIGKIIGKTLTDLIPKFLKNFSSQLDDLITNAVARLNKFLGAAGDEVISKQIISTHLNQAVLLGESVNSATQAGGSVASAVFQNSASTNLADLTLSKYQVEQLSKYISEAIEKFGQLQEVIADLLASMSNSQANRTDVAKAILQQTTAGGGGGSGGGGSMEIQNTKPTQTLYTDISTKQTQSSSETQKSQNYQQIAAHIPLNVGKNPVLTTTLNDDQLLKLSEQVQHDSEIIARLTDKKMKDLSEMSHTLTPENTLDISSLSSNAVSLIISVAVLLSALRTAETKLGSQLSLIAFDATKSAAENIVRQGLAALSSSITGAVTQVGITGIGAKKTHSGISDQKGALRKNLATAQSLEKELAGSKLGLNKQIDTNITSPQTNSSTKFLGKNKLAPDNISLSTEHKTSLSSPDISLQDKIDTQRRTYELNTLSAQQKQNIGRATMETSAVAGNISTSGGRYASALEEEEQLISQASSKQAEEASQVSKEASQATNQLIQKLLNIIDSINQSKNSAASQIAGNIRA

SEQ ID NO: 13 - DNA, 1740 bp, Shigella flexneri
  CDS (1)..(1740): ipaB
atgcataatgtaagcaccacaaccactggttttcctcttgccaaaatattgacttccactgagcttggagacaatactatccaagctgcaaatgatgcagctaacaaattattttctcttacaattgctgatcttactgctaaccaaaatattaatacaactaatgcacactcaacttcaaatatattaatccctgaacttaaagcaccaaagtcattaaatgcaagttcccaactaacgcttttaattggaaaccttattcaaatactcggtgaaaaatctttaactgcattaacaaataaaattactgcttggaagtcccagcaacaggcaagacagcaaaaaaacctagaattctccgataaaattaacactcttctatctgaaactgaaggactaaccagagactatgaaaaacaaattaataaactaaaaaacgcagattctaaaataaaagacctagaaaataaaattaaccaaattcaaacaagattatccgaactcgatccagagtcaccagaaaagaaaaaattaagccgggaagaaatacaactcactatcaaaaaagacgcagcagttaaagacaggacattgattgagcagaaaaccctgtcaattcatagcaaacttacagataaatcaatgcaactcgaaaaagaaatagactctttttctgcattttcaaacacagcatctgctgaacagctatcaacccagcagaaatcattaaccggacttgccagtgttactcaattgatggcaacctttattcaactagttggaaaaaataatgaagaatctttaaaaaatgatctggctctattccagtctctccaagaatcaagaaaaactgaaatggagagaaaatctgatgagtatgctgctgaagtacgtaaagcagaagaactcaacagagtaatgggttgtgttgggaaaatacttggggcacttttaactatcgttagtgttgttgcagcagctttttctggaggagcctctctagcactggcagctgttggtttagctcttatggttacggatgctatagtacaagcagcgaccggcaattccttcatggaacaagccctgaatccgatcatgaaagcagtcattgaacccttaatcaaactcctttcagatgcatttacaaaaatgctcgaaggcttgggcgtcgactcgaaaaaagccaaaatgattggctctattctgggggcaatcgcaggcgctcttgtcctagttgcagcagtcgttctcgtagccactgttggtaaacaggcagcagcaaaacttgcagaaaatattggcaaaataataggtaaaaccctcacagaccttataccaaagtttctcaagaatttttcttctcaactggacgatttaatcactaatgctgttgccagattaaataaatttcttggtgcagcgggtgatgaagtaatatccaaacaaattatttccacccatttaaaccaagcagttttattaggagaaagtgttaactctgccacacaagcgggaggaagtgtcgcttctgctgttttccagaacagcgcgtcgacaaatctagcagacctgacattatcgaaatatcaagttgaacaactgtcaaaatatatcagtgaagcaatagaaaaattcggccaattgcaggaagtaattgcagatctattagcctcaatgtccaactctcaggctaatagaactgatgttgcaaaagcaattttgcaacaaactactgct

SEQ ID NO: 14 - protein, 580 aa, Shigella flexneri
MHNVSTTTTGFPLAKILTSTELGDNTIQAANDAANKLFSLTIADLTANQNINTTNAHSTSNILIPELKAPKSLNASSQLTLLIGNLIQILGEKSLTALTNKITAWKSQQQARQQKNLEFSDKINTLLSETEGLTRDYEKQINKLKNADSKIKDLENKINQIQTRLSELDPESPEKKKLSREEIQLTIKKDAAVKDRTLIEQKTLSIHSKLTDKSMQLEKEIDSFSAFSNTASAEQLSTQQKSLTGLASVTQLMATFIQLVGKNNEESLKNDLALFQSLQESRKTEMERKSDEYAAEVRKAEELNRVMGCVGKILGALLTIVSVVAAAFSGGASLALAAVGLALMVTDAIVQAATGNSFMEQALNPIMKAVIEPLIKLLSDAFTKMLEGLGVDSKKAKMIGSILGAIAGALVLVAAVVLVATVGKQAAAKLAENIGKIIGKTLTDLIPKFLKNFSSQLDDLITNAVARLNKFLGAAGDEVISKQIISTHLNQAVLLGESVNSATQAGGSVASAVFQNSASTNLADLTLSKYQVEQLSKYISEAIEKFGQLQEVIADLLASMSNSQANRTDVAKAILQQTTA

SEQ ID NO: 15 - DNA, 1092 bp, Shigella flexneri
  CDS (1)..(1092): IpaC
atggaaattcaaaacacaaaaccaacccagactttatatacagatatatccacaaaacaaactcaaagttcttccgaaacacaaaaatcacaaaattatcagcagattgcagcgcatattccacttaatgtcggtaaaaatcccgtattaacaaccacattaaatgatgatcaacttttaaagttatcagagcaggttcagcatgattcagaaatcattgctcgccttactgacaaaaagatgaaagatctttcagagatgagtcacacccttactccagagaacactctggatatttccagtctttcttctaatgctgtttctttaattattagtgtagccgttctactttctgctctccgcactgcagaaactaaattgggctctcaattgtcattgattgcgttcgatgctacaaaatcagctgcagagaacattgttcggcaaggcctggcagccctatcatcaagcattactggagcagtcacacaagtaggtataacgggtatcggtgccaaaaaaacgcattcagggattagcgaccaaaaaggagccttaagaaagaaccttgccactgctcaatctcttgaaaaagagcttgcaggttctaaattagggttaaataaacaaatagatacaaatatcacctcaccacaaactaactctagcacaaaatttttaggtaaaaataaactggcgccagataatatatccctgtcaactgaacataaaacttctcttagttctcccgatatttctttgcaggataaaattgacacccagagaagaacttacgagctcaataccctttctgcgcagcaaaaacaaaacattggccgtgcaacaatggaaacatcagccgttgctggtaatatatccacatcaggagggcgttatgcatctgctcttgaagaagaagaacaactaatcagtcaggccagcagtaaacaagcagaggaagcatcccaagtatctaaagaagcatcccaagcgacaaatcaattaatacaaaaattattgaatataattgacagcatcaaccaatcaaagaattcggcagccagtcagattgctggtaacattcgagcttaa

SEQ ID NO: 16 - protein, 363 aa, Shigella flexneri
MEIQNTKPTQTLYTDISTKQTQSSSETQKSQNYQQIAAHIPLNVGKNPVLTTTLNDDQLLKLSEQVQHDSEIIARLTDKKMKDLSEMSHTLTPENTLDISSLSSNAVSLIISVAVLLSALRTAETKLGSQLSLIAFDATKSAAENIVRQGLAALSSSITGAVTQVGITGIGAKKTHSGISDQKGALRKNLATAQSLEKELAGSKLGLNKQIDTNITSPQTNSSTKFLGKNKLAPDNISLSTEHKTSLSSPDISLQDKIDTQRRTYELNTLSAQQKQNIGRATMETSAVAGNISTSGGRYASALEEEEQLISQASSKQAEEASQVSKEASQATNQLIQKLLNIIDSINQSKNSAASQIAGNIRA

SEQ ID NO: 17 - DNA, 999 bp, Shigella flexneri
  CDS (1)..(999): IpaD
atgaatataacaactctgactaatagtatttccacctcatcattcagtccaaacaataccaacggttcatcaaccgaaacagttaattctgatataaaaacaacgaccagttctcatcctgtaagttcccttactatgctcaacgacacccttcataatatcagaacaacaaatcaggcattaaagaaagagctttcacaaaaaacgttgactaaaacatcgctagaagaaatagcattacattcatctcagattagcatggatgtaaataaatccgctcaactattggatattctttccaggaacgaatatccaattaataaagacgcaagagaattattacattcagccccgaaagaagccgagcttgatggagatcaaatgatatctcatagagaactgtgggctaaaattgcaaactccatcaatgatattaatgaacagtatctgaaagtatatgaacatgccgttagttcatatactcaaatgtatcaagattttagcgctgttctttccagtcttgccggctggatctctcccggaggtaacgacggaaactccgtgaaattacaagtcaactcgcttaaaaaggcattggaagaactcaaggaaaaatataaagataaaccgctatatccagcaaataatactgttagtcaggaacaagcaaataaatggcttacagaattaggtggaacaatcggcaaggtatctcaaaaaaacgggggatatgttgtcagtataaacatgaccccaatagacaatatgttaaaaagcttagataatctaggtggaaatggcgaggttgtgctagataatgcaaaatatcaggcatggaatgccggattctctgccgaagatgaaacaatgaaaaataatcttcaaactttagttcaaaaatacagtaatgccaatagtatttttgataatttagtaaaggttttgagtagtacaataagctcatgtacagatacagataaactttttctccatttctga

SEQ ID NO: 18 - protein, 332 aa, Shigella flexneri
MNITTLTNSISTSSFSPNNTNGSSTETVNSDIKTTTSSHPVSSLTMLNDTLHNIRTTNQALKKELSQKTLTKTSLEEIALHSSQISMDVNKSAQLLDILSRNEYPINKDARELLHSAPKEAELDGDQMISHRELWAKIANSINDINEQYLKVYEHAVSSYTQMYQDFSAVLSSLAGWISPGGNDGNSVKLQVNSLKKALEELKEKYKDKPLYPANNTVSQEQANKWLTELGGTIGKVSQKNGGYVVSINMTPIDNMLKSLDNLGGNGEVVLDNAKYQAWNAGFSAEDETMKNNLQTLVQKYSNANSIFDNLVKVLSSTISSCTDTDKLFLHF

SEQ ID NO: 19 - DNA, 72 bp, Simian virus
  enhancer (1)..(72): DNA nuclear targeting sequence: SV40 enhancer
ggtgtggaaagtccccaggctccccagcaggcagaagtatgcaaagcatgcatctcaattagtcagcaacca

SEQ ID NO: 20 - DNA, 15 bp, Artificial sequence
  synthetic
  enhancer (1)..(15): DNA nuclear targeting sequence: glucocorticoid response element (GRE)
ggtacattttgttct

SEQ ID NO: 21 - DNA, 14 bp, Artificial sequence
  synthetic
  enhancer (1)..(14): DNA nuclear targeting sequence: binding site for nuclear factor kappaB (NF-kappaB)
tggggactttccgc

SEQ ID NO: 22 - DNA, 17 bp, Artificial sequence
  synthetic
  enhancer (1)..(17): DNA nuclear targeting sequence: tumor suppressor protein p53
tgcctggacttgcctgg

SEQ ID NO: 23 - DNA, 7 bp, Artificial sequence
  synthetic
  enhancer (1)..(7): DNA nuclear targeting sequence: activator protein 1 (AP-1)
tgactaa

SEQ ID NO: 24 - DNA, 10 bp, Artificial sequence
  synthetic
  enhancer (1)..(10): DNA nuclear targeting sequence. CCAAT-enhancer binding protein (C/EBP)
attgcgcaat

SEQ ID NO: 25 - DNA, 15 bp, Artificial sequence
  synthetic
  enhancer (1)..(15): DNA nuclear targeting sequence: consensus sites for cyclic AMP response element (CRE)
agcctgacgtcagag

SEQ ID NO: 26 - DNA, 7 bp, Artificial sequence
  synthetic
  enhancer (1)..(7): DNA nuclear targeting sequence: retinoid X receptor response element (DR1/RXRE)
  misc_feature (7)..(7): n is a, c, g, or t
aggtcan

SEQ ID NO: 27 - DNA, 9 bp, Artificial sequence
  synthetic
  enhancer (1)..(9): DNA nuclear targeting sequence: vitamin D receptor response element (DR3/VDR)
  misc_feature (7)..(9): n is a, c, g, or t
aggtcannn

SEQ ID NO: 28 - DNA, 10 bp, Artificial sequence
  synthetic
  enhancer (1)..(10): DNA nuclear targeting sequence: active thyroid hormone receptor response element (DR4/TR)
caggaggtca

SEQ ID NO: 29 - DNA, 11 bp, Artificial sequence
  synthetic
  enhancer (1)..(11): DNA nuclear targeting sequence: retinoic acid receptor response element (DR5/RARE)
  misc_feature (7)..(11): n is a, c, g, or t
aggtcannnnn

SEQ ID NO: 30 - DNA, 10 bp, Artificial sequence
  synthetic
  enhancer (1)..(10): DNA nuclear targeting sequence: early growth response factor 1 (Egr-1)
  misc_feature (10)..(10): n is a, c, g, or t
ggggtggggn

SEQ ID NO: 31 - DNA, 21 bp, Artificial sequence
  synthetic
  enhancer (1)..(21): DNA nuclear targeting sequence: interferon ?-activated sequence (GAS)
agtttcatattactctaaatc

SEQ ID NO: 32 - DNA, 15 bp, Artificial sequence
  synthetic
  enhancer (1)..(15): DNA nuclear targeting sequence: interferon-stimulated response element (ISRE)
tagtttcactttccc

SEQ ID NO: 33 - DNA, 14 bp, Artificial sequence
  synthetic
  enhancer (1)..(14): DNA nuclear targeting sequence: LPS IL-1beta response element (LILRE)
tcacttcctgagag

SEQ ID NO: 34 - DNA, 30 bp, Artificial sequence
  synthetic
  enhancer (1)..(30): DNA nuclear targeting sequence: nuclear factor of activated T cells (NFAT)
ggaggaaaaactgtttcatacagaaggcgt

SEQ ID NO: 35 - DNA, 23 bp, Artificial sequence
  synthetic
  enhancer (1)..(23): DNA nuclear targeting sequence: serum response element (SRE)
aggatgtccatattaggacatct

SEQ ID NO: 36 - DNA, 14 bp, Artificial sequence
  synthetic
  enhancer (1)..(14): DNA nuclear targeting sequence: serum response factor (SRF)
gtccatattaggac

SEQ ID NO: 37 - DNA, 40 bp, Artificial sequence
  synthetic
  enhancer (1)..(40): DNA nuclear targeting sequence: TGF-beta/Activin response element (TARE)
cattgtcagtctagacatactccgagattgtggattgaga

SEQ ID NO: 38 - protein, 7 aa, simian virus
  MISC_FEATURE (1)..(7): Nuclear localization sequence: SV40 (simian virus 40) large T antigen
PKKKRKV

SEQ ID NO: 39 - protein, 9 aa, Artificial sequence
  synthetic
  MISC_FEATURE (1)..(9): Nuclear localization sequence: c-Myc
PAAKRVKLD

SEQ ID NO: 40 - protein, 16 aa, Artificial sequence
  synthetic
  MISC_FEATURE (1)..(16): Nuclear localization sequence: nucleoplasmin
KRPAATKKAGQAKKKK

SEQ ID NO: 41 - protein, 18 aa, Artificial sequence
  synthetic
  MISC_FEATURE (1)..(18): Nuclear localization sequence: Human T-cell leukemia virus type-1 Rex protein (HTLV-1 Rex)
MPKTRRRPRRSQRKRPPT

SEQ ID NO: 42 - protein, 25 aa, Artificial sequence
  synthetic
  MISC_FEATURE (1)..(25): Nuclear localization sequence: EGL-13
MSRRRKANPTKLSENAKKLAKEVEN

SEQ ID NO: 43 - protein, 9 aa, Artificial sequence
  synthetic
  MISC_FEATURE (1)..(9): Nuclear localization sequence: TUS-protein
KLKIKRPVK

SEQ ID NO: 44 - protein, 29 aa, Artificial sequence
  synthetic
  MISC_FEATURE (1)..(29): Nuclear localization sequence: M9 domain of hnRNP A1
NDFGNYNNQSSNFGPMKGGNFGGRSSGPY

SEQ ID NO: 45 - protein, 8 aa, Epstein-Barr virus
  MISC_FEATURE (1)..(8): Nuclear localization sequence: Epstein-Barr virus nuclear antigen 1 (EBNA-1)
KRPRSPSS

SEQ ID NO: 46 - protein, 19 aa, Artificial sequence
  synthetic
  MISC_FEATURE (1)..(19): Nuclear localization sequence: Mitogen-activated protein kinase 1/3 (ERK 1/2)
LDQLNHILGILGSPSQEDL

SEQ ID NO: 47 - protein, 15 aa, Artificial sequence
  synthetic
  MISC_FEATURE (1)..(15): Nuclear localization sequence: Nuclear factor of activated T-cells, cytoplasmic 1 (NFATc1)
RSSRPASPCNKRKYS

SEQ ID NO: 48 - protein, 29 aa, Artificial sequence
  synthetic
  MISC_FEATURE (1)..(29): Nuclear localization sequence: Parathyroid hormone-related protein (PTHrP)
RYLTQETNKVETYKEQPLKTPGKKKKGKP

SEQ ID NO: 49 - DNA, 3177 bp, E. coli
  misc_feature (1)..(3177): pMUT1 native plasmid of E. coli Nissle 1917
agcttttagagcttggataccatgacccaatgaagctacctcaaaactttgaatgatcgagcggcaggctaaatgaaatcttgagattcattcagtctcgtcgtaatctcactattgtaaaaacgaaaaaaccaccctggcaggtggtttttcgaaggttagttaatcctggcagattctctaaccgtggtaacagtcttgtgcgagacatgtcaccaaatactgtcctttcagtgtagcctcagttaggccgccacttcaagaactctcgttacatctctcgcacatcctgcttaccagtggccgttgccagtggcgttaagtcgtgtcttaccgggttggactcaagacgatagttaccggataaggcgccaggtcgggctgaacggggggttcgtgcacacagcccagcttggagcgaacgacctacaccgaacctgagatacctaacagcgtgacgtatgagaaagcgccacgcttcccgaagagaaaggcggacaggtatccggtaagcggcagggtcggaacaggagagcgcacgagggagcttccagggggaaacgcctggtatctttatatagtcctgtcgggtttcgccacctctgacttgagcgtcgatttttgtgatgctcgtcaggggggcggagcctatggaaaaagcctcccgcggagaccccttcttctgggatctttgtcttttgctcacatgttctttccggttttatcccccgattctgtggataaccgtattaccgcctttgagtgagctgacaccgctcgccgcagtcgaacgaccgagcgtagcgagtgagtgagcgaggaagcggaagagagaatttatgtgacattttctccttacgctcctctatgccgttctgcatcctgtccggatgcgttatatcccggtaagattttccgcttcaaagcgtgtctgtatgctgttctggagttcttctgcgagttcgtgcagtttctcacacatggcggcctgttcgtcggcattgagtgcgtccagtttttcgagcagcgtcaggctctgactttttatgaatcccgccatgttgagtacggcttgctgctgcttattcatcttttcgttttctccgttctgtctgtcatctgcgttgtgtgattatatcgcgtaccacttttcgactgttttgctgccgctattctgccgcttggctttttgacgggcatttctgtcagacaacactgtcactgccaaaaaactgccgtgcctttgtcggtaattcgagcttgctgacaggacaggatgtgcaattgttataccgcgcatacatgcacgctattacaattgccctggtcaggctttgccccgacacccatgtcagatacggagccatgttttatgacaaaacgaagtggaagtaatacgcgcaggcgggctatcagtcgccctgttcgtctgacggcagaagaagaccaggaaatcagaaaaagggctgctgaatgcggcaagaccgtttccggtttttttcgggcggcagctctcggtaagaaagttaactcactgactgatgatcgggtactgaaagaagttatgagactgggggcgttacagaaaaaactctttatcgacggcaagcgtgtcggggacagggagtatgcggaggtgctgatcgctattacggagtatcaccgtgccctgttatccaggcttatggcagattagcttcccggagagaaaactgtcgaaaactgacggtatgaacaccgtaagctcccaaagtgatcaccattcgctttcatgcatagctatgcagcgagctgaaacgatcctgacgcatccttcctgtttttccggggtaaaacatctctttttgcggtgtctcgcgtcagaatcgcgttcagcgcgtttcagtggtgcgtacaattaagggattatggtaaatatatgagctatgcgataactttaactgtgaagcgatgaacccattacaggcaaagccaattactcctgacagtggtttagccagaagcagggctaccaagaccaatgcaataagtaatatatcgttttgctatcgtgccatccgtcgcgctcagttccattgtgcttttttaagctgtcgtttttcttacggtatataccggttttttatggcgtggtttcttaacttgttcagctactgatggacccatgtatctaggtagtcaactagctttgttagatcataaaatattgcgaccaccatatcggcgatcactcttcgatgttggtttcttgtccaagagattagctttttcaagatcattgatagctctctgaacagtccgtacagaaacccccatacgtatggctagactttccattgacggatgcggccactcttgcaaactccaccagtgaacgatcaggttaagtagtgtgttaaaggccactgaagttagctttttctcgttttgtataaaaaacaatacggtaggcactgctgtccagccaagagacaaaccgccagctttccatttattcttaacggagtaagtcattgattttcctaagccccaaaatatttaaagtatatattatatgtatattcatatgaatagggtgacactggcgccattattgtgcaaccaaaaaagactactctgaaaacgaggaaaagattttttcctgcctgaattagatacggagttagcgatatgaaaaccgaacaacgtcatgatcttgttaaagatattgaggtttttggcgtatccttgtctctgttgatttccagagcgaatgagaagtctgttacaatgccatctggtctaagtcgggagcagagaagagcatgggcagcggagcaggcgcgcaaaatccacaattgaatattgtctcattctctgagaccttcaacctttattacacatccagatattctgcaaaaacactcgataaaatcgatgatttcattgagcattttgaaaaatacaatctctttggcgatcctttaaaaggatatccagcttggactggcaaagtatcgccatcgtggaaagtgcctgatcattacgaaaacaaagaagctattgagaagtatgctagagctaacaaattatggcatgctcatttaggcgatccggtttttaaagatacgtttcatgggaaatacaaggtttctgactgggttattcatttccagcggctgacaccgaaccatataa

SEQ ID NO: 50 - DNA, 2389 bp, Artificial sequence
  synthetic
  misc_feature (1)..(2389): pMB-dapA plasmid
ttccccctggaagctccctcgtgcgctctcctgttccgaccctgccgcttaccggatacctgtccgcctttctcccttcgggaagcgtggcgctttctcatagctcacgctgtaggtatctcagttcggtgtaggtcgttcgctccaagctgggctgtgtgcacgaaccccccgttcagcccgaccgctgcgccttatccggtaactatcgtcttgagtccaacccggtaagacacgacttatcgccactggcagcagccactggtaacaggattagcagagcgaggtatgtaggcggtgctacagagttcttgaagtggtggcctaactacggctacactagaaggacagtatttggtatctgcgctctgctgaagccagttaccttcggaaaaagagttggtagctcttgatccggcaaacaaaccaccgctggtagcggtggtttttttgtttgcaagcagcagattacgcgcagaaaaaaaggatctcaagaagatcctttgatcttttctacggggtctgacgctcagtggaacgaaaactcacgttaagggattttggtcatgagattatcaaaaaggatcttcacctagatccttttaaattaaaaatgaagttttaaatcaatctaaagtatatatgagtaaacttggtctgacagaaaattacgccccgccctgccactcatcgcagtactgttgtaattcattaagcattctgccgacatggaagccatcacagacggcatgatgaacctgaatcgccagcggcatcagcaccttgtcgccttgcgtataatatttgcccatggtgaaaacgggggcgaagaagttgtccatattggccacgtttaaatcaaaactggtgaaactcacccagggattggctgagacgaaaaacatattctcaataaaccctttagggaaataggccaggttttcaccgtaacacgccacatcttgcgaatatatgtgtagaaactgccggaaatcgtcgtggtattcactccagagcgatgaaaacgtttcagtttgctcatggaaaacggtgtaacaagggtgaacactatcccatatcaccagctcaccgtctttcattgccatacggaattccggatgagcattcatcaggcgggcaagaatgtgaataaaggccggataaaacttgtgcttatttttctttacggtctttaaaaaggccgtaatatccagctgaacggtctggttataggtacattgagcaactgactgaaatgcctcaaaatgttctttacgatgccattgggatatatcaacggtggtatatccagtgatttttttctccattttagcttccttagctcctgaaaatctcgataactcaaaaaatacgcccggtagtgatcttatttcattatggtgaaagttggaacctcttacgtaggggttccgcgcacatttccccgaaaagtgccacctgacgtctaagaaaccattattatcatgacattaacctataaaaataggcgtatcacgaggcagaatttcagataaaaaaaatccttagctttcgctaaggatgatttctggaattctaaagatctttgacagctagctcagtcctaggtataatactagtgacaatacttcccgtgaacagttttagagctagaaatagcaagttaaaataaggctagtccgttatcaacttgaaaaagtggcaccgagtcggtgctttttttgaagcttgggcccgaacaaaaactcatctcagaagaggatctgaatagcgccgtcgaccatcatcatcatcatcattgagtttaaacggtctccagcttggctgttttggcggatgagagaagattttcagcctgatacagattaaatcagaacgcagaagcggtctgataaaacagaatttgcctggcggcagtagcgcggtggtcccacctgaccccatgccgaactcagaagtgaaacgccgtagcgccgatggtagtgtggggtctccccatgcgagagtagggaactgccaggcatcaaataaaacgaaaggctcagtcgaaagactgggcctttcgttttatctgttgtttgtcggtgaactggatccttactcgagtctagactgcaggcttcctcgctcactgactcgctgcgctcggtcgttcggctgcggcgagcggtatcagctcactcaaaggcggtaatacggttatccacagaatcaggggataacgcaggaaagaacatgtgagcaaaaggccagcaaaaggccaggaaccgtaaaaaggccgcgttgctggcgtttttccataggctccgcccccctgacgagcatcacaaaaatcgacgctcaagtcagaggtggcgaaacccgacaggactataaagataccaggcgt

SEQ ID NO: 51 - DNA, 35 bp, E.coli
  promoter (1)..(35): bacterial promoter (Registry of Standard Biological Parts BBa_J23119) modified to end with an SpeI site
ttgacagctagctcagtcctaggtataatactagt

SEQ ID NO: 52 - DNA, 20 bp, Artificial sequence
  synthetic
  misc_feature (1)..(20): dapA gRNA target
gacaatacttcccgtgaaca

SEQ ID NO: 53 - DNA, 76 bp, Artificial sequence
  synthetic
  misc_feature (1)..(76): guide RNA scaffold for the Streptococcus pyogenes CRISPR/Cas9 system
gttttagagctagaaatagcaagttaaaataaggctagtccgttatcaacttgaaaaagtggcaccgagtcggtgc

SEQ ID NO: 54 - DNA, 101 bp, Artificial sequence
  synthetic
  misc_feature (1)..(101): spacer
gaagcttgggcccgaacaaaaactcatctcagaagaggatctgaatagcgccgtcgaccatcatcatcatcatcattgagtttaaacggtctccagcttgg

SEQ ID NO: 55 - DNA, 47 bp, E. coli
  terminator (1)..(47): transcription terminator T1 from the E. coli rrnB gene
caaataaaacgaaaggctcagtcgaaagactgggcctttcgttttat

SEQ ID NO: 56 - DNA, 44 bp, E. coli
  terminator (1)..(44): Terminator from the E.coli ribosonal RNA rrnC
atttcagataaaaaaaatccttagctttcgctaaggatgatttc

SEQ ID NO: 57 - DNA, 36 bp, Artificial sequence
  synthetic
  promoter (1)..(36): cmR promoter
ttatttcattatggtgaaagttggaacctcttacgt

SEQ ID NO: 58 - DNA, 660 bp, Artificial sequence
  synthetic
  CDS (1)..(660): rmR gene encoding chloramphenicol acetyltransferase
atggagaaaaaaatcactggatataccaccgttgatatatcccaatggcatcgtaaagaacattttgaggcatttcagtcagttgctcaatgtacctataaccagaccgttcagctggatattacggcctttttaaagaccgtaaagaaaaataagcacaagttttatccggcctttattcacattcttgcccgcctgatgaatgctcatccggaattccgtatggcaatgaaagacggtgagctggtgatatgggatagtgttcacccttgttacaccgttttccatgagcaaactgaaacgttttcatcgctctggagtgaataccacgacgatttccggcagtttctacacatatattcgcaagatgtggcgtgttacggtgaaaacctggcctatttccctaaagggtttattgagaatatgtttttcgtctcagccaatccctgggtgagtttcaccagttttgatttaaacgtggccaatatggacaacttcttcgcccccgttttcaccatgggcaaatattatacgcaaggcgacaaggtgctgatgccgctggcgattcaggttcatcatgccgtctgtgatggcttccatgtcggcagaatgcttaatgaattacaacagtactgcgatgagtggcagggcggggcgtaa

SEQ ID NO: 59 - protein, 219 aa, Artificial sequence
  Synthetic Construct
MEKKITGYTTVDISQWHRKEHFEAFQSVAQCTYNQTVQLDITAFLKTVKKNKHKFYPAFIHILARLMNAHPEFRMAMKDGELVIWDSVHPCYTVFHEQTETFSSLWSEYHDDFRQFLHIYSQDVACYGENLAYFPKGFIENMFFVSANPWVSFTSFDLNVANMDNFFAPVFTMGKYYTQGDKVLMPLAIQVHHAVCDGFHVGRMLNELQQYCDEWQGGA

SEQ ID NO: 60 - DNA, 589 bp, Artificial sequence
  synthetic
  rep_origin (1)..(589): high-copy-number ColE1/pMB1/pBR322/pUC origin of replication
tttccataggctccgcccccctgacgagcatcacaaaaatcgacgctcaagtcagaggtggcgaaacccgacaggactataaagataccaggcgtttccccctggaagctccctcgtgcgctctcctgttccgaccctgccgcttaccggatacctgtccgcctttctcccttcgggaagcgtggcgctttctcatagctcacgctgtaggtatctcagttcggtgtaggtcgttcgctccaagctgggctgtgtgcacgaaccccccgttcagcccgaccgctgcgccttatccggtaactatcgtcttgagtccaacccggtaagacacgacttatcgccactggcagcagccactggtaacaggattagcagagcgaggtatgtaggcggtgctacagagttcttgaagtggtggcctaactacggctacactagaaggacagtatttggtatctgcgctctgctgaagccagttaccttcggaaaaagagttggtagctcttgatccggcaaacaaaccaccgctggtagcggtggtttttttgtttgcaagcagcagattacgcgcagaaaaaaaggatctcaa

SEQ ID NO: 61 - DNA, 12095 bp, Artificial sequence
  synthetic
  misc_feature (1)..(12095): pHM156 plasmid
gttcttatggctcttgtatctatcagtgaagcatcaagactaacaaacaaaagtagaacaactgttcaccgttacatatcaaagggaaaactgtccatacccatggattcttcgtctgtttctactggtattggcacaaacctgattccaatttgagcaaggctatgtgccatctcgatactcgttcttaactcaacagaagatgctttgtgcatacagcccctcgtttattatttatctcctcagccagccgctgtgctttcagtggatttcggataacagaaaggccgggaaatacccagcctcgctttgtaacggagtagacgaaagtgattgcgcctacccggatattatcgtgaggatgcgtcatcgccattgctccccaaatacaaaaccaatttcagccagtgcctcgtccattttttcgatgaactccggcacgatctcgtcaaaactcgccatgtacttttcatcccgctcaatcacgacataatgcaggccttcacgcttcatacgcgggtcatagttggcaaagtaccaggcattttttcgcgtcacccacatgctgtactgcacctgggccatgtaagctgactttatggcctcgaaaccaccgagccggaacttcatgaaatcccgggaggtaaacgggcatttcagttcaaggccgttgccgtcactgcataaaccatcgggagagcaggcggtacgcatactttcgtcgcgatagatgatcggggattcagtaacattcacgccggaagtgaattcaaacagggttctggcgtcgttctcgtactgttttccccaggccagtgctttagcgttaacttccggagccacaccggtgcaaacctcagcaagcagggtgtggaagtaggacattttcatgtcaggccacttctttccggagcggggttttgctatcacgttgtgaacttctgaagcggtgatgacgccgagccgtaatttgtgccacgcatcatccccctgttcgacagctctcacatcgatcccggtacgctgcaggataatgtccggtgtcatgctgccaccttctgctctgcggctttctgtttcaggaatccaagagcttttactgcttcggcctgtgtcagttctgacgatgcacgaatgtcgcggcgaaatatctgggaacagagcggcaataagtcgtcatcccatgttttatccagggcgatcagcagagtgttaatctcctgcatggtttcatcgttaaccggagtgatgtcgcgttccggctgacgttctgcagtgtatgcagtattttcgacaatgcgctcggcttcatccttgtcatagataccagcaaatccgaaggccagacgggcacactgaatcatggctttatgacgtaacatccgtttgggatgcgactgccacggccccgtgatttctctgccttcgcgagttttgaatggttcgcggcggcattcatccatccattcggtaacgcagatcggatgattacggtccttgcggtaaatccggcatgtacaggattcattgtcctgctcaaagtccatgccatcaaactgctggttttcattgatgatgcgggaccagccatcaacgcccaccaccggaacgatgccattctgcttatcaggaaaggcgtaaatttctttcgtccacggattaaggccgtactggttggcaacgatcagtaatgcgatgaactgcgcatcgctggcatcacctttaaatgccgtctggcgaagagtggtgatcagttcctgtgggtcgacagaatccatgccgacacgttcagccagcttcccagccagcgttgcgagtgcagtactcattcgttttatacctctgaatcaatatcaacctggtggtgagcaatggtttcaaccatgtaccggatgtgttctgccatgcgctcctgaaactcaacatcgtcatcaaacgcacgggtaatggattttttgctggccccgtggcgttgcaaatgatcgatgcatagcgattcaaacaggtgctggggcaggcctttttccatgtcgtctgccagttctgcctctttctcttcacgggcgagctgctggtagtgacgcgcccagctctgagcctcaagacgatcctgaatgtaataagcgttcatggctgaactcctgaaatagctgtgaaaatatcgcccgcgaaatgccgggctgattaggaaaacaggaaagggggttagtgaatgcttttgcttgatctcagtttcagtattaatatccattttttataacctccttagagctcgaattcccaaaaaaacgggtatggagaaacagtagagagttgcgataaaaagcgtcaggtaggatccgctaatcttatggataaaaatgctatggcatagcaaagtgtgacgccgtgcaaataatcaatgtggacttttctgccgtgattatagacacttttgttacgcgtttttgtcatggctttggtcccgctttgttacagaatgcttttaataagcggggttaccggtttggttagcgagaagagccagtaaaagacgcagtgacggcaatgtctgatgcaatatggacaattggtttcttctctgaatggcgggagtatgaaaagtatggctgaagcgcaaaatgatcccctgctgccgggatactcgtttaatgcccatctggtggcgggtttaacgccgattgaggccaacggttatctcgatttttttatcgaccgaccgctgggaatgaaaggttatattctcaatctcaccattcgcggtcagggggtggtgaaaaatcagggacgagaatttgtttgccgaccgggtgatattttgctgttcccgccaggagagattcatcactacggtcgtcatccggaggctcgcgaatggtatcaccagtgggtttactttcgtccgcgcgcctactggcatgaatggcttaactggccgtcaatatttgccaatacggggttctttcgcccggatgaagcgcaccagccgcatttcagcgacctgtttgggcaaatcattaacgccgggcaaggggaagggcgctattcggagctgctggcgataaatctgcttgagcaattgttactgcggcgcatggaagcgattaacgagtcgctccatccaccgatggataatcgggtacgcgaggcttgtcagtacatcagcgatcacctggcagacagcaattttgatatcgccagcgtcgcacagcatgtttgcttgtcgccgtcgcgtctgtcacatcttttccgccagcagttagggattagcgtcttaagctggcgcgaggaccaacgtatcagccaggcgaagctgcttttgagcaccacccggatgcctatcgccaccgtcggtcgcaatgttggttttgacgatcaactctatttctcgcgggtatttaaaaaatgcaccggggccagcccgagcgagttccgtgccggttgtgaagaaaaagtgaatgatgtagccgtcaagttgtcataataaatcgatgcaggtggcacttttcggggaaatgtgccggatccccctcaagtcaaaagcctccggtcggaggcttttgactttctgctatggaggtcaggtatgatttaaatggtcagtattgagcgatatctagagaattcgtcaacgaattcaagcttaaggttgaaaaataaaaacggcgctaaaaagcgccgttttttttgacggtggtattaagacccactttcacatttaagttgtttttctaatccgcatatgatcaattcaaggccgaataagaaggctggctctgcaccttggtgatcaaataattcgatagcttgtcgtaataatggcggcatactatcagtagtaggtgtttccctttcttctttagcgacttgatgctcttgatcttccaatacgcaacctaaagtaaaatgccccacagcgctgagtgcatataatgcattctctagtgaaaaaccttgttggcataaaaaggctaattgattttcgagagtttcatactgtttttctgtaggccgtgtacctaaatgtacttttgctccatcgcgatgacttagtaaagcacatctaaaacttttagcgttattacgtaaaaaatcttgccagctttccccttctaaagggcaaaagtgagtatggtgcctatctaacatctcaatggctaaggcgtcgagcaaagcccgcttattttttacatgccaatacaatgtaggctgctctacacctagcttctgggcgagtttacgggttgttaaaccttcgattccgacctcattaagcagctctaatgcgctgttaatcactttacttttatctaatctagacatattcaccaccctgaattgactctcttccgggcgctatcatgccataccgcgaaaggttttgcgccattcgatggtgtcctcgagttggtaacgaatcagacaattgacggcttgacggagtagcatagctcgagtccctatcagtgatagagattgacatccctatcagtgatagagatactgagcacgagcgcacgagggagcttccgttttagagctagaaatagcaagttaaaataaggctagtccgttatcaacttgaaaaagtggcaccgagtcggtgctttttttgaagcttgggcccgaacaaaaactcatctcagaagaggatctgaatagcgccgtcgaccatcatcatcatcatcattgagtttaaacggtctccagcttggctgttttggcggatgagagaagattttcagcctgatacagattaaatcagaacgcagaagcggtctgataaaacagaatttgcctggcggcagtagcgcggtggtcccacctgaccccatgccgaactcagaagtgaaacgccgtagcgccgatggtagtgtggggtctccccatgcgagagtagggaactgccaggcatcaaataaaacgaaaggctcagtcgaaagactgggcctttcgttttatctgttgtttgtcggtgaactggatccttactcgagtctagactgcagttgaattcgcggccgcttctagagtttacggctagctcagtcctaggtactatgctagctatcagcaggacgcactgaccaggaggtacaatcaatggataagaaatactcaataggcttagatatcggcacaaatagcgtcggatgggcggtgatcactgatgaatataaggttccgtctaaaaagttcaaggttctgggaaatacagaccgccacagtatcaaaaaaaatcttataggggctcttttatttgacagtggagagacagcggaagcgactcgtctcaaacggacagctcgtagaaggtatacacgtcggaagaatcgtatttgttatctacaggagattttttcaaatgagatggcgaaagtagatgatagtttctttcatcgacttgaagagtcttttttggtggaagaagacaagaagcatgaacgtcatcctatttttggaaatatagtagatgaagttgcttatcatgagaaatatccaactatctatcatctgcgaaaaaaattggtagattctactgataaagcggatttgcgcttaatctatttggccttagcgcatatgattaagtttcgtggtcattttttgattgagggagatttaaatcctgataatagtgatgtggacaaactatttatccagttggtacaaacctacaatcaattatttgaagaaaaccctattaacgcaagtggagtagatgctaaagcgattctttctgcacgattgagtaaatcaagacgattagaaaatctcattgctcagctccccggtgagaagaaaaatggcttatttgggaatctcattgctttgtcattgggtttgacccctaattttaaatcaaattttgatttggcagaagatgctaaattacagctttcaaaagatacttacgatgatgatttagataatttattggcgcaaattggagatcaatatgctgatttgtttttggcagctaagaatttatcagatgctattttactttcagatatcctaagagtaaatactgaaataactaaggctcccctatcagcttcaatgattaaacgctacgatgaacatcatcaagacttgactcttttaaaagctttagttcgacaacaacttccagaaaagtataaagaaatcttttttgatcaatcaaaaaacggatatgcaggttatattgatgggggagctagccaagaagaattttataaatttatcaaaccaattttagaaaaaatggatggtactgaggaattattggtgaaactaaatcgtgaagatttgctgcgcaagcaacggacctttgacaacggctctattccccatcaaattcacttgggtgagctgcatgctattttgagaagacaagaagacttttatccatttttaaaagacaatcgtgagaagattgaaaaaatcttgacttttcgaattccttattatgttggtccattggcgcgtggcaatagtcgttttgcatggatgactcggaagtctgaagaaacaattaccccatggaattttgaagaagttgtcgataaaggtgcttcagctcaatcatttattgaacgcatgacaaactttgataaaaatcttccaaatgaaaaagtactaccaaaacatagtttgctttatgagtattttacggtttataacgaattgacaaaggtcaaatatgttactgaaggaatgcgaaaaccagcatttctttcaggtgaacagaagaaagccattgttgatttactcttcaaaacaaatcgaaaagtaaccgttaagcaattaaaagaagattatttcaaaaaaatagaatgttttgatagtgttgaaatttcaggagttgaagatagatttaatgcttcattaggtacctaccatgatttgctaaaaattattaaagataaagattttttggataatgaagaaaatgaagatatcttagaggatattgttttaacattgaccttatttgaagatagggagatgattgaggaaagacttaaaacatatgctcacctctttgatgataaggtgatgaaacagcttaaacgtcgccgttatactggttggggacgtttgtctcgaaaattgattaatggtattagggataagcaatctggcaaaacaatattagattttttgaaatcagatggttttgccaatcgcaattttatgcagctgatccatgatgatagtttgacatttaaagaagacattcaaaaagcacaagtgtctggacaaggcgatagtttacatgaacatattgcaaatttagctggtagccctgctattaaaaaaggtattttacagactgtaaaagttgttgatgaattggtcaaagtaatggggcggcataagccagaaaatatcgttattgaaatggcacgtgaaaatcagacaactcaaaagggccagaaaaattcgcgagagcgtatgaaacgaatcgaagaaggtatcaaagaattaggaagtcagattcttaaagagcatcctgttgaaaatactcaattgcaaaatgaaaagctctatctctattatctccaaaatggaagagacatgtatgtggaccaagaattagatattaatcgtttaagtgattatgatgtcgatcacattgttccacaaagtttccttaaagacgattcaatagacaataaggtcttaacgcgttctgataaaaatcgtggtaaatcggataacgttccaagtgaagaagtagtcaaaaagatgaaaaactattggagacaacttctaaacgccaagttaatcactcaacgtaagtttgataatttaacgaaagctgaacgtggaggtttgagtgaacttgataaagctggttttatcaaacgccaattggttgaaactcgccaaatcactaagcatgtggcacaaattttggatagtcgcatgaatactaaatacgatgaaaatgataaacttattcgagaggttaaagtgattaccttaaaatctaaattagtttctgacttccgaaaagatttccaattctataaagtacgtgagattaacaattaccatcatgcccatgatgcgtatctaaatgccgtcgttggaactgctttgattaagaaatatccaaaacttgaatcggagtttgtctatggtgattataaagtttatgatgttcgtaaaatgattgctaagtctgagcaagaaataggcaaagcaaccgcaaaatatttcttttactctaatatcatgaacttcttcaaaacagaaattacacttgcaaatggagagattcgcaaacgccctctaatcgaaactaatggggaaactggagaaattgtctgggataaagggcgagattttgccacagtgcgcaaagtattgtccatgccccaagtcaatattgtcaagaaaacagaagtacagacaggcggattctccaaggagtcaattttaccaaaaagaaattcggacaagcttattgctcgtaaaaaagactgggatccaaaaaaatatggtggttttgatagtccaacggtagcttattcagtcctagtggttgctaaggtggaaaaagggaaatcgaagaagttaaaatccgttaaagagttactagggatcacaattatggaaagaagttcctttgaaaaaaatccgattgactttttagaagctaaaggatataaggaagttaaaaaagacttaatcattaaactacctaaatatagtctttttgagttagaaaacggtcgtaaacggatgctggctagtgccggagaattacaaaaaggaaatgagctggctctgccaagcaaatatgtgaattttttatatttagctagtcattatgaaaagttgaagggtagtccagaagataacgaacaaaaacaattgtttgtggagcagcataagcattatttagatgagattattgagcaaatcagtgaattttctaagcgtgttattttagcagatgccaatttagataaagttcttagtgcatataacaaacatagagacaaaccaatacgtgaacaagcagaaaatattattcatttatttacgttgacgaatcttggagctcccgctgcttttaaatattttgatacaacaattgatcgtaaacgatatacgtctacaaaagaagttttagatgccactcttatccatcaatccatcactggtctttatgaaacacgcattgatttgagtcagctaggaggtgacggcagcggtgattataaagatgatgatgataaatgagatatcattcaggacgagcctcagactccagcgtaactggactggcggaacccctatttgtttatttttctaaatacattcaaatatgtatccgctcatgagacaataaccctgataaatgcttcaataatattgaaaaaggaagagtatgagtattcaacatttccgtgtcgcccttattcccttttttgcggcattttgccttcctgtttttgctcacccagaaacgctggtgaaagtaaaagatgctgaagatcagttgggtgcacgagtgggttacatcgaactggatctcaacagcggtaagatccttgagagttttcgccccgaagaacgttttccaatgatgagcacttttaaagttctgctatgtggcgcggtattatcccgtattgacgccgggcaagagcaactcggtcgccgcatacactattctcagaatgacttggttgagtactcaccagtcacagaaaagcatcttacggatggcatgacagtaagagaattatgcagtgctgccataaccatgagtgataacactgcggccaacttacttctgacaacgatcggaggaccgaaggagctaaccgcttttttgcacaacatgggggatcatgtaactcgccttgatcgttgggaaccggagctgaatgaagccataccaaacgacgagcgtgacaccacgatgcctgtagcaatggcaacaacgttgcgcaaactattaactggcgaactacttactctagcttcccggcaacaattaatagactggatggaggcggataaagttgcaggaccacttctgcgctcggcccttccggctggctggtttattgctgataaatctggagccggtgagcgtgggtctcgcggtatcattgcagcactggggccagatggtaagccctcccgtatcgtagttatctacacgacggggagtcaggcaactatggatgaacgaaatagacagatcgctgagataggtgcctcactgattaagcattggtaactgtcagaccaagtttactcatatatactttagattgatttaaaacttcatttttaatttaaaaggatctaggtgaagatcctttttgataatctcatgaccaaaatcccttaacgtgagttttcgttccactgagcgtcagaccccgttgatgataccgctgccttactgggtgcattagccagtctgaatgacctgtcacgggataatccgaagtggtcagactggaaaatcagagggcaggaactgctgaacagcaaaaagtcagatagcaccacatagcagacccgccataaaacgccctgagaagcccgtgacgggcttttcttgtattatgggtagtttccttgcatgaatccataaaaggcgcctgtagtgccatttacccccattcactgccagagccgtgagcgcagcgaactgaatgtcacgaaaaagacagcgactcaggtgcctgatggtcggagacaaaaggaatattcagcgatttgcccgattgcggccgcaaccgagcttgcgagggtgctacttaagcctttagggttttaaggtctgttttgtagaggagcaaacagcgtttgcgacatccttttgtaatactgcggaactgactaaagtagtgagttatacacagggctgggatctattctttttatctttttttattctttctttattctataaattataaccacttgaatataaacaaaaaaaacacacaaaggtctagcggaatttacagagggtctagcagaatttacaagttttccagcaaaggtctagcagaatttacagatacccacaactcaaaggaaaaggactagtaattatcattgactagcccatctcaattggtatagtgattaaaatcacctagaccaattgagatgtatgtctgaattagttgttttcaaagcaaatgaactagcgattagtcgctatgacttaacggagcatgaaaccaagctaattttatgctgtgtggcactactcaaccccacgattgaaaaccctacaaggaaagaacggacggtatcgttcacttataaccaatacgctcagatgatgaacatcagtagggaaaatgcttatggtgtattagctaaagcaaccagagagctgatgacgagaactgtggaaatcaggaatcctttggttaaaggctttgagattttccagtggacaaactatgccaagttctcaagcgaaaaattagaattagtttttagtgaagagatattgccttatcttttccagttaaaaaaattcataaaatataatctggaacatgttaagtcttttgaaaacaaatactctatgaggatttatgagtggttattaaaagaactaacacaaaagaaaactcacaaggcaaatatagagattagccttgatgaatttaagttcatgttaatgcttgaaaataactaccatgagtttaaaaggcttaaccaatgggttttgaaaccaataagtaaagatttaaacacttacagcaatatgaaattggtggttgataagcgaggccgcccgactgatacgttgattttccaagttgaactagatagacaaatggatctcgtaaccgaacttgagaacaaccagataaaaatgaatggtgacaaaataccaacaaccattacatcagattcctacctacgtaacggactaagaaaaacactacacgatgctttaactgcaaaaattcagctcaccagttttgaggcaaaatttttgagtgacatgcaaagtaagtatgatctcaatggttcgttctcatggctcacgcaaaaacaacgaaccacactagagaacatactggctaaatacggaaggatctgag

SEQ ID NO: 62 - DNA, 4104 bp, Artificial sequence
  synthetic
  CDS (1)..(4104): CRISPR Cas9 gene encoding Cas9(D10A)
atggataagaaatactcaataggcttagatatcggcacaaatagcgtcggatgggcggtgatcactgatgaatataaggttccgtctaaaaagttcaaggttctgggaaatacagaccgccacagtatcaaaaaaaatcttataggggctcttttatttgacagtggagagacagcggaagcgactcgtctcaaacggacagctcgtagaaggtatacacgtcggaagaatcgtatttgttatctacaggagattttttcaaatgagatggcgaaagtagatgatagtttctttcatcgacttgaagagtcttttttggtggaagaagacaagaagcatgaacgtcatcctatttttggaaatatagtagatgaagttgcttatcatgagaaatatccaactatctatcatctgcgaaaaaaattggtagattctactgataaagcggatttgcgcttaatctatttggccttagcgcatatgattaagtttcgtggtcattttttgattgagggagatttaaatcctgataatagtgatgtggacaaactatttatccagttggtacaaacctacaatcaattatttgaagaaaaccctattaacgcaagtggagtagatgctaaagcgattctttctgcacgattgagtaaatcaagacgattagaaaatctcattgctcagctccccggtgagaagaaaaatggcttatttgggaatctcattgctttgtcattgggtttgacccctaattttaaatcaaattttgatttggcagaagatgctaaattacagctttcaaaagatacttacgatgatgatttagataatttattggcgcaaattggagatcaatatgctgatttgtttttggcagctaagaatttatcagatgctattttactttcagatatcctaagagtaaatactgaaataactaaggctcccctatcagcttcaatgattaaacgctacgatgaacatcatcaagacttgactcttttaaaagctttagttcgacaacaacttccagaaaagtataaagaaatcttttttgatcaatcaaaaaacggatatgcaggttatattgatgggggagctagccaagaagaattttataaatttatcaaaccaattttagaaaaaatggatggtactgaggaattattggtgaaactaaatcgtgaagatttgctgcgcaagcaacggacctttgacaacggctctattccccatcaaattcacttgggtgagctgcatgctattttgagaagacaagaagacttttatccatttttaaaagacaatcgtgagaagattgaaaaaatcttgacttttcgaattccttattatgttggtccattggcgcgtggcaatagtcgttttgcatggatgactcggaagtctgaagaaacaattaccccatggaattttgaagaagttgtcgataaaggtgcttcagctcaatcatttattgaacgcatgacaaactttgataaaaatcttccaaatgaaaaagtactaccaaaacatagtttgctttatgagtattttacggtttataacgaattgacaaaggtcaaatatgttactgaaggaatgcgaaaaccagcatttctttcaggtgaacagaagaaagccattgttgatttactcttcaaaacaaatcgaaaagtaaccgttaagcaattaaaagaagattatttcaaaaaaatagaatgttttgatagtgttgaaatttcaggagttgaagatagatttaatgcttcattaggtacctaccatgatttgctaaaaattattaaagataaagattttttggataatgaagaaaatgaagatatcttagaggatattgttttaacattgaccttatttgaagatagggagatgattgaggaaagacttaaaacatatgctcacctctttgatgataaggtgatgaaacagcttaaacgtcgccgttatactggttggggacgtttgtctcgaaaattgattaatggtattagggataagcaatctggcaaaacaatattagattttttgaaatcagatggttttgccaatcgcaattttatgcagctgatccatgatgatagtttgacatttaaagaagacattcaaaaagcacaagtgtctggacaaggcgatagtttacatgaacatattgcaaatttagctggtagccctgctattaaaaaaggtattttacagactgtaaaagttgttgatgaattggtcaaagtaatggggcggcataagccagaaaatatcgttattgaaatggcacgtgaaaatcagacaactcaaaagggccagaaaaattcgcgagagcgtatgaaacgaatcgaagaaggtatcaaagaattaggaagtcagattcttaaagagcatcctgttgaaaatactcaattgcaaaatgaaaagctctatctctattatctccaaaatggaagagacatgtatgtggaccaagaattagatattaatcgtttaagtgattatgatgtcgatcacattgttccacaaagtttccttaaagacgattcaatagacaataaggtcttaacgcgttctgataaaaatcgtggtaaatcggataacgttccaagtgaagaagtagtcaaaaagatgaaaaactattggagacaacttctaaacgccaagttaatcactcaacgtaagtttgataatttaacgaaagctgaacgtggaggtttgagtgaacttgataaagctggttttatcaaacgccaattggttgaaactcgccaaatcactaagcatgtggcacaaattttggatagtcgcatgaatactaaatacgatgaaaatgataaacttattcgagaggttaaagtgattaccttaaaatctaaattagtttctgacttccgaaaagatttccaattctataaagtacgtgagattaacaattaccatcatgcccatgatgcgtatctaaatgccgtcgttggaactgctttgattaagaaatatccaaaacttgaatcggagtttgtctatggtgattataaagtttatgatgttcgtaaaatgattgctaagtctgagcaagaaataggcaaagcaaccgcaaaatatttcttttactctaatatcatgaacttcttcaaaacagaaattacacttgcaaatggagagattcgcaaacgccctctaatcgaaactaatggggaaactggagaaattgtctgggataaagggcgagattttgccacagtgcgcaaagtattgtccatgccccaagtcaatattgtcaagaaaacagaagtacagacaggcggattctccaaggagtcaattttaccaaaaagaaattcggacaagcttattgctcgtaaaaaagactgggatccaaaaaaatatggtggttttgatagtccaacggtagcttattcagtcctagtggttgctaaggtggaaaaagggaaatcgaagaagttaaaatccgttaaagagttactagggatcacaattatggaaagaagttcctttgaaaaaaatccgattgactttttagaagctaaaggatataaggaagttaaaaaagacttaatcattaaactacctaaatatagtctttttgagttagaaaacggtcgtaaacggatgctggctagtgccggagaattacaaaaaggaaatgagctggctctgccaagcaaatatgtgaattttttatatttagctagtcattatgaaaagttgaagggtagtccagaagataacgaacaaaaacaattgtttgtggagcagcataagcattatttagatgagattattgagcaaatcagtgaattttctaagcgtgttattttagcagatgccaatttagataaagttcttagtgcatataacaaacatagagacaaaccaatacgtgaacaagcagaaaatattattcatttatttacgttgacgaatcttggagctcccgctgcttttaaatattttgatacaacaattgatcgtaaacgatatacgtctacaaaagaagttttagatgccactcttatccatcaatccatcactggtctttatgaaacacgcattgatttgagtcagctaggaggtgac

SEQ ID NO: 63 - protein, 1368 aa, Artificial sequence [sequence omitted]

SEQ ID NO: 64 - DNA, 24 bp, Artificial sequence
  synthetic
  misc_feature (1)..(24): FLAG
gattataaagatgatgatgataaa

SEQ ID NO: 65 - DNA, 104 bp, Artificial sequence
  synthetic
  promoter (1)..(104): AmpR promoter
gcggaacccctatttgtttatttttctaaatacattcaaatatgtatccgctcatgagacaataaccctgataaatgcttcaataatattgaaaaaggaagagt

SEQ ID NO: 66 - DNA, 861 bp, Artificial sequence
  synthetic
  CDS (1)..(861): ampR gene encoding ampicillin resistance
atgagtattcaacatttccgtgtcgcccttattcccttttttgcggcattttgccttcctgtttttgctcacccagaaacgctggtgaaagtaaaagatgctgaagatcagttgggtgcacgagtgggttacatcgaactggatctcaacagcggtaagatccttgagagttttcgccccgaagaacgttttccaatgatgagcacttttaaagttctgctatgtggcgcggtattatcccgtattgacgccgggcaagagcaactcggtcgccgcatacactattctcagaatgacttggttgagtactcaccagtcacagaaaagcatcttacggatggcatgacagtaagagaattatgcagtgctgccataaccatgagtgataacactgcggccaacttacttctgacaacgatcggaggaccgaaggagctaaccgcttttttgcacaacatgggggatcatgtaactcgccttgatcgttgggaaccggagctgaatgaagccataccaaacgacgagcgtgacaccacgatgcctgtagcaatggcaacaacgttgcgcaaactattaactggcgaactacttactctagcttcccggcaacaattaatagactggatggaggcggataaagttgcaggaccacttctgcgctcggcccttccggctggctggtttattgctgataaatctggagccggtgagcgtgggtctcgcggtatcattgcagcactggggccagatggtaagccctcccgtatcgtagttatctacacgacggggagtcaggcaactatggatgaacgaaatagacagatcgctgagataggtgcctcactgattaagcattggtaa

SEQ ID NO: 67 - protein, 286 aa, Artificial sequence
  Synthetic Construct
MSIQHFRVALIPFFAAFCLPVFAHPETLVKVKDAEDQLGARVGYIELDLNSGKILESFRPEERFPMMSTFKVLLCGAVLSRIDAGQEQLGRRIHYSQNDLVEYSPVTEKHLTDGMTVRELCSAAITMSDNTAANLLLTTIGGPKELTAFLHNMGDHVTRLDRWEPELNEAIPNDERDTTMPVAMATTLRKLLTGELLTLASRQQLIDWMEADKVAGPLLRSALPAGWFIADKSGAGERGSRGIIAALGPDGKPSRIVVIYTTGSQATMDERNRQIAEIGASLIKHW

SEQ ID NO: 68 - DNA, 223 bp, Artificial sequence
  synthetic
  rep_origin (1)..(223): pSC101 ori
gagttatacacagggctgggatctattctttttatctttttttattctttctttattctataaattataaccacttgaatataaacaaaaaaaacacacaaaggtctagcggaatttacagagggtctagcagaatttacaagttttccagcaaaggtctagcagaatttacagatacccacaactcaaaggaaaaggactagtaattatcattgactagccc

SEQ ID NO: 69 - DNA, 951 bp, Artificial sequence
  synthetic
  rep_origin (1)..(951): Rep101
atgtctgaattagttgttttcaaagcaaatgaactagcgattagtcgctatgacttaacggagcatgaaaccaagctaattttatgctgtgtggcactactcaaccccacgattgaaaaccctacaaggaaagaacggacggtatcgttcacttataaccaatacgctcagatgatgaacatcagtagggaaaatgcttatggtgtattagctaaagcaaccagagagctgatgacgagaactgtggaaatcaggaatcctttggttaaaggctttgagattttccagtggacaaactatgccaagttctcaagcgaaaaattagaattagtttttagtgaagagatattgccttatcttttccagttaaaaaaattcataaaatataatctggaacatgttaagtcttttgaaaacaaatactctatgaggatttatgagtggttattaaaagaactaacacaaaagaaaactcacaaggcaaatatagagattagccttgatgaatttaagttcatgttaatgcttgaaaataactaccatgagtttaaaaggcttaaccaatgggttttgaaaccaataagtaaagatttaaacacttacagcaatatgaaattggtggttgataagcgaggccgcccgactgatacgttgattttccaagttgaactagatagacaaatggatctcgtaaccgaacttgagaacaaccagataaaaatgaatggtgacaaaataccaacaaccattacatcagattcctacctacgtaacggactaagaaaaacactacacgatgctttaactgcaaaaattcagctcaccagttttgaggcaaaatttttgagtgacatgcaaagtaagtatgatctcaatggttcgttctcatggctcacgcaaaaacaacgaaccacactagagaacatactggctaaatacggaaggatctga

SEQ ID NO: 70 - DNA, 245 bp, Artificial sequence
  synthetic
  terminator (1)..(245): lambda tL3 terminator
ctactggtattggcacaaacctgattccaatttgagcaaggctatgtgccatctcgatactcgttcttaactcaacagaagatgctttgtgcatacagcccctcgtttattatttatctcctcagccagccgctgtgctttcagtggatttcggataacagaaaggccgggaaatacccagcctcgctttgtaacggagtagacgaaagtgattgcgcctacccggatattatcgtgaggatgcg

SEQ ID NO: 71 - DNA, 78 bp, Artificial sequence
  synthetic
  promoter (1)..(78): lacI promoter
gacaccatcgaatggcgcaaaacctttcgcggtatggcatgatagcgcccggaagagagtcaattcagggtggtgaat

SEQ ID NO: 72 - DNA, 624 bp, Artificial sequence
  synthetic
  CDS (1)..(624): TetR gene encoding tetracyclione resistance
atgtctagattagataaaagtaaagtgattaacagcgcattagagctgcttaatgaggtcggaatcgaaggtttaacaacccgtaaactcgcccagaagctaggtgtagagcagcctacattgtattggcatgtaaaaaataagcgggctttgctcgacgccttagccattgagatgttagataggcaccatactcacttttgccctttagaaggggaaagctggcaagattttttacgtaataacgctaaaagttttagatgtgctttactaagtcatcgcgatggagcaaaagtacatttaggtacacggcctacagaaaaacagtatgaaactctcgaaaatcaattagcctttttatgccaacaaggtttttcactagagaatgcattatatgcactcagcgctgtggggcattttactttaggttgcgtattggaagatcaagagcatcaagtcgctaaagaagaaagggaaacacctactactgatagtatgccgccattattacgacaagctatcgaattatttgatcaccaaggtgcagagccagccttcttattcggccttgaattgatcatatgcggattagaaaaacaacttaaatgtgaaagtgggtcttaa

SEQ ID NO: 73 - protein, 207 aa, Artificial sequence
  Synthetic Construct
MSRLDKSKVINSALELLNEVGIEGLTTRKLAQKLGVEQPTLYWHVKNKRALLDALAIEMLDRHHTHFCPLEGESWQDFLRNNAKSFRCALLSHRDGAKVHLGTRPTEKQYETLENQLAFLCQQGFSLENALYALSAVGHFTLGCVLEDQEHQVAKEERETPTTDSMPPLLRQAIELFDHQGAEPAFLFGLELIICGLEKQLKCESGS

SEQ ID NO: 74 - DNA, 34 bp, Artificial sequence
  synthetic
  terminator (1)..(34): arcA terminator (bidirectional)
aataaaaacggcgctaaaaagcgccgtttttttt

SEQ ID NO: 75 - DNA, 32 bp, Artificial sequence
  synthetic
  terminator (1)..(32): tonB terminator
agtcaaaagcctccggtcggaggcttttgact

SEQ ID NO: 76 - DNA, 879 bp, Artificial sequence
  synthetic
  CDS (1)..(879): araC gene
atggctgaagcgcaaaatgatcccctgctgccgggatactcgtttaatgcccatctggtggcgggtttaacgccgattgaggccaacggttatctcgatttttttatcgaccgaccgctgggaatgaaaggttatattctcaatctcaccattcgcggtcagggggtggtgaaaaatcagggacgagaatttgtttgccgaccgggtgatattttgctgttcccgccaggagagattcatcactacggtcgtcatccggaggctcgcgaatggtatcaccagtgggtttactttcgtccgcgcgcctactggcatgaatggcttaactggccgtcaatatttgccaatacggggttctttcgcccggatgaagcgcaccagccgcatttcagcgacctgtttgggcaaatcattaacgccgggcaaggggaagggcgctattcggagctgctggcgataaatctgcttgagcaattgttactgcggcgcatggaagcgattaacgagtcgctccatccaccgatggataatcgggtacgcgaggcttgtcagtacatcagcgatcacctggcagacagcaattttgatatcgccagcgtcgcacagcatgtttgcttgtcgccgtcgcgtctgtcacatcttttccgccagcagttagggattagcgtcttaagctggcgcgaggaccaacgtatcagccaggcgaagctgcttttgagcaccacccggatgcctatcgccaccgtcggtcgcaatgttggttttgacgatcaactctatttctcgcgggtatttaaaaaatgcaccggggccagcccgagcgagttccgtgccggttgtgaagaaaaagtgaatgatgtagccgtcaagttgtcataa

SEQ ID NO: 77 - protein, 292 aa, Artificial sequence
  Synthetic Construct
MAEAQNDPLLPGYSFNAHLVAGLTPIEANGYLDFFIDRPLGMKGYILNLTIRGQGVVKNQGREFVCRPGDILLFPPGEIHHYGRHPEAREWYHQWVYFRPRAYWHEWLNWPSIFANTGFFRPDEAHQPHFSDLFGQIINAGQGEGRYSELLAINLLEQLLLRRMEAINESLHPPMDNRVREACQYISDHLADSNFDIASVAQHVCLSPSRLSHLFRQQLGISVLSWREDQRISQAKLLLSTTRMPIATVGRNVGFDDQLYFSRVFKKCTGASPSEFRAGCEEKVNDVAVKLS

SEQ ID NO: 78 - DNA, 285 bp, Artificial sequence
  synthetic
  promoter (1)..(285): araBAD promoter
aagaaaccaattgtccatattgcatcagacattgccgtcactgcgtcttttactggctcttctcgctaaccaaaccggtaaccccgcttattaaaagcattctgtaacaaagcgggaccaaagccatgacaaaaacgcgtaacaaaagtgtctataatcacggcagaaaagtccacattgattatttgcacggcgtcacactttgctatgccatagcatttttatccataagattagcggatcctacctgacgctttttatcgcaactctctactgtttctccat

SEQ ID NO: 79 - DNA, 417 bp, Artificial sequence
  synthetic
  CDS (1)..(417): Gam gene
atggatattaatactgaaactgagatcaagcaaaagcattcactaaccccctttcctgttttcctaatcagcccggcatttcgcgggcgatattttcacagctatttcaggagttcagccatgaacgcttattacattcaggatcgtcttgaggctcagagctgggcgcgtcactaccagcagctcgcccgtgaagagaaagaggcagaactggcagacgacatggaaaaaggcctgccccagcacctgtttgaatcgctatgcatcgatcatttgcaacgccacggggccagcaaaaaatccattacccgtgcgtttgatgacgatgttgagtttcaggagcgcatggcagaacacatccggtacatggttgaaaccattgctcaccaccaggttgatattgattcagaggtataa

SEQ ID NO: 80 - protein, 138 aa, Artificial sequence
  Synthetic Construct
MDINTETEIKQKHSLTPFPVFLISPAFRGRYFHSYFRSSAMNAYYIQDRLEAQSWARHYQQLAREEKEAELADDMEKGLPQHLFESLCIDHLQRHGASKKSITRAFDDDVEFQERMAEHIRYMVETIAHHQVDIDSEV

SEQ ID NO: 81 - DNA, 786 bp, Artificial sequence
  synthetic
  CDS (1)..(786): Beta gene
atgagtactgcactcgcaacgctggctgggaagctggctgaacgtgtcggcatggattctgtcgacccacaggaactgatcaccactcttcgccagacggcatttaaaggtgatgccagcgatgcgcagttcatcgcattactgatcgttgccaaccagtacggccttaatccgtggacgaaagaaatttacgcctttcctgataagcagaatggcatcgttccggtggtgggcgttgatggctggtcccgcatcatcaatgaaaaccagcagtttgatggcatggactttgagcaggacaatgaatcctgtacatgccggatttaccgcaaggaccgtaatcatccgatctgcgttaccgaatggatggatgaatgccgccgcgaaccattcaaaactcgcgaaggcagagaaatcacggggccgtggcagtcgcatcccaaacggatgttacgtcataaagccatgattcagtgtgcccgtctggccttcggatttgctggtatctatgacaaggatgaagccgagcgcattgtcgaaaatactgcatacactgcagaacgtcagccggaacgcgacatcactccggttaacgatgaaaccatgcaggagattaacactctgctgatcgccctggataaaacatgggatgacgacttattgccgctctgttcccagatatttcgccgcgacattcgtgcatcgtcagaactgacacaggccgaagcagtaaaagctcttggattcctgaaacagaaagccgcagagcagaaggtggcagcatga

SEQ ID NO: 82 - protein, 261 aa, Artificial sequence
  Synthetic Construct
MSTALATLAGKLAERVGMDSVDPQELITTLRQTAFKGDASDAQFIALLIVANQYGLNPWTKEIYAFPDKQNGIVPVVGVDGWSRIINENQQFDGMDFEQDNESCTCRIYRKDRNHPICVTEWMDECRREPFKTREGREITGPWQSHPKRMLRHKAMIQCARLAFGFAGIYDKDEAERIVENTAYTAERQPERDITPVNDETMQEINTLLIALDKTWDDDLLPLCSQIFRRDIRASSELTQAEAVKALGFLKQKAAEQKVAA

SEQ ID NO: 83 - DNA, 681 bp, Artificial sequence
  synthetic
  CDS (1)..(681): Exo gene
atgacaccggacattatcctgcagcgtaccgggatcgatgtgagagctgtcgaacagggggatgatgcgtggcacaaattacggctcggcgtcatcaccgcttcagaagttcacaacgtgatagcaaaaccccgctccggaaagaagtggcctgacatgaaaatgtcctacttccacaccctgcttgctgaggtttgcaccggtgtggctccggaagttaacgctaaagcactggcctggggaaaacagtacgagaacgacgccagaaccctgtttgaattcacttccggcgtgaatgttactgaatccccgatcatctatcgcgacgaaagtatgcgtaccgcctgctctcccgatggtttatgcagtgacggcaacggccttgaactgaaatgcccgtttacctcccgggatttcatgaagttccggctcggtggtttcgaggccataaagtcagcttacatggcccaggtgcagtacagcatgtgggtgacgcgaaaaaatgcctggtactttgccaactatgacccgcgtatgaagcgtgaaggcctgcattatgtcgtgattgagcgggatgaaaagtacatggcgagttttgacgagatcgtgccggagttcatcgaaaaaatggacgaggcactggctgaaattggttttgtatttggggagcaatggcgatga

SEQ ID NO: 84 - protein, 226 aa, Artificial sequence
  Synthetic Construct
MTPDIILQRTGIDVRAVEQGDDAWHKLRLGVITASEVHNVIAKPRSGKKWPDMKMSYFHTLLAEVCTGVAPEVNAKALAWGKQYENDARTLFEFTSGVNVTESPIIYRDESMRTACSPDGLCSDGNGLELKCPFTSRDFMKFRLGGFEAIKSAYMAQVQYSMWVTRKNAWYFANYDPRMKREGLHYVVIERDEKYMASFDEIVPEFIEKMDEALAEIGFVFGEQWR

SEQ ID NO: 85 - DNA, 2389 bp, Artificial sequence
  synthetic
  misc_feature (1)..(2389): pHM154 plasmid
gaattctaaagatctttgacagctagctcagtcctaggtataatactagtgccagatgagcgcgaagcgtgttttagagctagaaatagcaagttaaaataaggctagtccgttatcaacttgaaaaagtggcaccgagtcggtgctttttttgaagcttgggcccgaacaaaaactcatctcagaagaggatctgaatagcgccgtcgaccatcatcatcatcatcattgagtttaaacggtctccagcttggctgttttggcggatgagagaagattttcagcctgatacagattaaatcagaacgcagaagcggtctgataaaacagaatttgcctggcggcagtagcgcggtggtcccacctgaccccatgccgaactcagaagtgaaacgccgtagcgccgatggtagtgtggggtctccccatgcgagagtagggaactgccaggcatcaaataaaacgaaaggctcagtcgaaagactgggcctttcgttttatctgttgtttgtcggtgaactggatccttactcgagtctagactgcaggcttcctcgctcactgactcgctgcgctcggtcgttcggctgcggcgagcggtatcagctcactcaaaggcggtaatacggttatccacagaatcaggggataacgcaggaaagaacatgtgagcaaaaggccagcaaaaggccaggaaccgtaaaaaggccgcgttgctggcgtttttccataggctccgcccccctgacgagcatcacaaaaatcgacgctcaagtcagaggtggcgaaacccgacaggactataaagataccaggcgtttccccctggaagctccctcgtgcgctctcctgttccgaccctgccgcttaccggatacctgtccgcctttctcccttcgggaagcgtggcgctttctcatagctcacgctgtaggtatctcagttcggtgtaggtcgttcgctccaagctgggctgtgtgcacgaaccccccgttcagcccgaccgctgcgccttatccggtaactatcgtcttgagtccaacccggtaagacacgacttatcgccactggcagcagccactggtaacaggattagcagagcgaggtatgtaggcggtgctacagagttcttgaagtggtggcctaactacggctacactagaaggacagtatttggtatctgcgctctgctgaagccagttaccttcggaaaaagagttggtagctcttgatccggcaaacaaaccaccgctggtagcggtggtttttttgtttgcaagcagcagattacgcgcagaaaaaaaggatctcaagaagatcctttgatcttttctacggggtctgacgctcagtggaacgaaaactcacgttaagggattttggtcatgagattatcaaaaaggatcttcacctagatccttttaaattaaaaatgaagttttaaatcaatctaaagtatatatgagtaaacttggtctgacagaaaattacgccccgccctgccactcatcgcagtactgttgtaattcattaagcattctgccgacatggaagccatcacagacggcatgatgaacctgaatcgccagcggcatcagcaccttgtcgccttgcgtataatatttgcccatggtgaaaacgggggcgaagaagttgtccatattggccacgtttaaatcaaaactggtgaaactcacccagggattggctgagacgaaaaacatattctcaataaaccctttagggaaataggccaggttttcaccgtaacacgccacatcttgcgaatatatgtgtagaaactgccggaaatcgtcgtggtattcactccagagcgatgaaaacgtttcagtttgctcatggaaaacggtgtaacaagggtgaacactatcccatatcaccagctcaccgtctttcattgccatacggaattccggatgagcattcatcaggcgggcaagaatgtgaataaaggccggataaaacttgtgcttatttttctttacggtctttaaaaaggccgtaatatccagctgaacggtctggttataggtacattgagcaactgactgaaatgcctcaaaatgttctttacgatgccattgggatatatcaacggtggtatatccagtgatttttttctccattttagcttccttagctcctgaaaatctcgataactcaaaaaatacgcccggtagtgatcttatttcattatggtgaaagttggaacctcttacgtaggggttccgcgcacatttccccgaaaagtgccacctgacgtctaagaaaccattattatcatgacattaacctataaaaataggcgtatcacgaggcagaatttcagataaaaaaaatccttagctttcgctaaggatgatttctg

SEQ ID NO: 86 - DNA, 20 bp, Artificial sequence
  synthetic
  misc_feature (1)..(20): gRNA spacer for trpR
gccagatgagcgcgaagcgt

SEQ ID NO: 87 - DNA, 6752 bp, Artificial sequence
  synthetic
  misc_feature (1)..(6752): pV3 plasmid
cggctccagatttatcagcaataaaccagccagccggaagggccgagcgcagaagtggtcctgcaactttatccgcctccatccagtctattaattgttgccgggaagctagagtaagtagttcgccagttaatagtttgcgcaacgttgttgccattgctgcaggcatcgtggtgtcacgctcgtcgtttggtatggcttcattcagctccggttcccaacgatcaaggcgagttacatgatcccccatgttgtgcaaaaaagcggttagctccttcggtcctccgatcgttgtcagaagtaagttggccgcagtgttatcactcatggttatggcagcactgcataattctcttactgtcatgccatccgtaagatgcttttctgtgactggtgagtactcaaccaagtcattctgagaatagtgtatgcggcgaccgagttgctcttgcccggcgtcaacacgggataataccgcgccacatagcagaactttaaaagtgctcatcattggaaaacgttcttcggggcgaaaactctcaaggatcttaccgctgttgagatccagttcgatgtaacccactcgtgcacccaactgatcttcagcatcttttactttcaccagcgtttctgggtgagcaaaaacaggaaggcaaaatgccgcaaaaaagggaataagggcgacacggaaatgttgaatactcatactcttcctttttcaatattattgaagcatttatcagggttattgtctcatgagcggatacatatttgacgtctaagaaaccattattatcatgacattaacctataaaaataggcgtatcacgaggccctttcgtcttcacctcgagttgacggctagctcagtcctaggtattgtgctagcccccataaccgtcgcataagaaggattttatgagcatgtattttaacaaaatcatctcgtttaacattatttcccgtatcgtgatttgcatttttctgatctgtgggatgttcatggctggagccagtgagaaatacgatgcgaatgcgccgcagcaggtacagccctacagcgttagctccagcgccttcgaaaatcttcaccctaacaatgagatggagagttctatcaatcccttctcggcaagcgacaccgagcgcaacgccgctattatcgatcgtgctaacaaggagcaggaaacagaagctgtcaataagatgatctcgactggcgcgcgcttagctgcctccggacgtgcctctgacgtcgcccatagcatggttggggatgctgtaaaccaggagatcaagcaatggttaaaccgcttcggaactgctcaggtgaatttgaattttgacaaaaatttttctttaaaagagtcatcccttgattggttagcaccatggtacgactcagcgtcattcttattcttctctcagttgggcatccgcaataaggactcacgtaataccctgaaccttggcgttggaatccgtacgttagagaatggctggctgtatggactgaacacgttctacgataatgatttaacgggtcataaccatcgtatcggattgggtgccgaagcctggaccgactatcttcaattagccgcaaacggatattttcgtttgaacggttggcactctagccgcgatttctcggattacaaagaacgccccgcaacgggaggtgatcttcgtgcgaacgcgtaccttcccgcacttccccaacttggtggcaaattgatgtatgagcaatataccggggagcgcgtggccttgtttggcaaggataacttacaacgtaatccatatgccgttaccgccggcattaactacaccccagtaccattacttacggtcggagttgatcaacgtatgggtaagtcctcaaagcacgaaacgcaatggaatctgcagatgaactaccgtcttggggaatcgtttcagtcgcagttgtcgccatcggccgttgctggtactcgtttgttagcagaaagtcgttacaaccttgtagatcgcaataataatatcgttcttgagtatcagaaacaacaggtagttaagcttacccttagccccgcaactatttcaggcttacctggtcaggtgtatcaggtgaacgcccaagtccaaggggcttcagccgtacgcgagattgtctggagcgacgcggaacttattgctgcgggtggtacgctgactcctcttagcacaacccagttcaatcttgttctgcccccgtataaacgtacagcccaagtcagccgcgtcaccgatgaccttacggccaatttttatagtctgtccgccttggccgtagatcaccagggtaaccgtagcaattctttcacgttatccgtaacggtccagcagccccaattaacgttaactgcggcggtcattggcgacggggcgccagcaaacgggaagacagcgattaccgtggaattcacagtggccgactttgaagggaaaccccttgccggccaggaggtggttattacaacgaacaatggtgctttaccaaacaaaattaccgagaaaacggatgctaatggcgtagctcgcatcgctttgaccaataccaccgacggggtaacagtagttactgctgaggtcgaaggccagcgtcagtcagtggatacgcatttcgtcaaagggacgattgctgcagataaaagcaccctggccgctgtgcctacgtccatcatcgccgacgggcttatggcttcgactattacgctggaactgaaagatacatacggtgacccacaggccggagccaacgtagctttcgataccacactgggtaacatgggagtgattactgatcataacgatgggacatactccgctcccttaacgtccacgacgttgggggttgccactgtaaccgttaaagtggacggcgcggctttctcagtcccctctgtgaccgtaaacttcactgcagatcccatccccgacgctgggcgcagtagttttactgttagtacgccggacatcctggctgacggcaccatgtctagtaccctgtcgttcgtcccagtagataagaacggtcatttcatctcgggcatgcagggccttagttttactcagaacggtgttccagtatccatcagtccgatcacagagcaacccgatagttacaccgctaccgtcgttggtaactctgttggggacgttacaattacacctcaggttgataccttaattctttcaacactgcaaaaaaagatttcgctgttcccggttcctacgttgacagggattcttgttaacgggcagaacttcgctaccgacaaaggatttcctaagacaatcttcaaaaatgccacctttcaattgcaaatggacaatgatgttgcaaacaacacgcaatacgaatggtcttcttcgtttacgcccaatgtgtctgtcaacgaccaagggcaggtcacaattacttatcaaacatattcggaagttgctgtgacggcgaaaagcaaaaagtttccctcgtactctgtctcgtaccgtttttatcctaaccgttggatttacgacggcggccgctccttagtatcgagcctggaagcttctcgtcagtgccagggatcggatatgtcagctgtacttgaatcgagccgtgctacgaatgggacgcgcgctcctgacggtactttatggggagagtgggggagcttgacagcctattcctcggactggcagtcgggcgaatactgggtaaagaaaacaagtacagattttgaaacaatgaacatggatacgggggccctgcagccgggacctgcgtacttagcattccccttatgtgcgttaagtatttaagaccttgcggagaggtttatatgaaaaagatcatgttagtattcatcaccttgatcctggtttccctgcctattgcccaacaaaccgaagcgaaggacgcgagcgcattcaataaggaaaattcaatctcgtcaatggcgcctccagcgtctcctcccgcctcgcctaagactccgattgaaaaaaaacatgcagacgaaattgacaaatatatccaaggattagactataataagaacaacgttctggtataccacggggatgcggtcaccaacgttccaccgcgtaaaggatacaaggatgggaatgaatacattgtcgttgaaaaaaaaaagaagagcatcaatcaaaacaatgctgatattcaggtggttaacgcgatttcttcattaacatatccgggagccttggtaaaagccaactcagaattggttgaaaaccagccagatgtgttaccggtaaaacgcgactcactgacactgtcgatcgaccttcctggaatgacgaatcaggataacaaaatcgtcgtaaagaatgctactaagtccaatgttaacaatgccgtaaacactctggtcgaacgctggaatgaaaagtatgctcaagcttaccccaatgtgtctgcgaagatcgattacgatgatgaaatggcgtattccgagtcgcaattaatcgcgaaattcggcacagcatttaaggcagtgaataattccttgaacgtaaattttggcgcaatctcagaaggcaagatgcaagaagaggtcatctcgttcaaacaaatctattacaacgtgaacgttaacgaacctacgcgcccaagccgtttcttcggaaaggccgtcaccaaggaacagcttcaggcgctggaagttaacgctgagaatccaccggcgtatatttcgtcagtggcttacggccgccaggtatacttgaagctttctacgaacagtcattctaccaaggtgaaggcagctttcgacgctgcggtttcagggaaatcggtgtcgggggacgtcgaattaaccaacattattaagaacagctcgtttaaagcagttatctatggcggttctgctaaggacgaagtacaaattatcgatggaaatctgggtgaccttcgtgacatccttaagaagggtgcaactttcaatcgcgagacgccaggggtacccattgcgtatactaccaacttccttaaagataatgaattagctgttatcaagaacaattcggagtatattgaaacaacaagcaaagcttatacagacggaaaaattaatatcgatcactcaggcggatatgtggctcagtttaatatctcttgggatgaagtcaattatgacccggagggcaacgaaattgtacaacataagaactggtccgaaaataataaatcgaaacttgcccatttcacgtcgagtatttacttacctggcaacgcccgtaatattaacgtgtacgcaaaagaatgtactggtctggcttgggaagcgtggcgcactgtgattgacgaccgtaacttgccgttagtgaagaatcgtaacatttctatttgggggactactttgtacccaaaatatagcaataaggttgacaacccaatcgaatgagctagaggcatcaaataaaacgaaaggctcagtcgaaagactgggcctttcgttttatctgttgtttgtcggtgaacgctctcctgagtaggacaaatccgccgccctagacgcgctagcggagtgtatactggcttactatgttggcactgatgagggtgtcagtgaagtgcttcatgtggcaggagaaaaaaggctgcaccggtgcgtcagcagaatatgtgatacaggatatattccgcttcctcgctcactgactcgctacgctcggtcgttcgactgcggcgagcggaaatggcttacgaacggggcggagatttcctggaagatgccaggaagatacttaacagggaagtgagagggccgcggcaaagccgtttttccataggctccgcccccctgacaagcatcacgaaatctgacgctcaaatcagtggtggcgaaacccgacaggactataaagataccaggcgtttccccctggcggctccctcgtgcgctctcctgttcctgcctttcggtttaccggtgtcattccgctgttatggccgcgtttgtctcattccacgcctgacactcagttccgggtaggcagttcgctccaagctggactgtatgcacgaaccccccgttcagtccgaccgctgcgccttatccggtaactatcgtcttgagtccaacccggaaagacatgcaaaagcaccactggcagcagccactggtaattgatttagaggagttagtcttgaagtcatgcgccggttaaggctaaactgaaaggacaagttttggtgactgcgctcctccaagccagttacctcggttcaaagagttggtagctcagagaaccttcgaaaaaccgccctgcaaggcggttttttcgttttcagagcaagagattacgcgcagaccaaaacgatctcaagaagatcatcttattaatcagataaaatatttctagatttcagtgcaatttatctcttcaaatgtagcacctgaagtcagccccatacgatataagttgtctagtgcttggattctcaccaataaaaaacgcccggcggcaaccgagcgttctgaacaaatccagatggagttctgaggtcattactggatctatcaacaggagtccaagcgagctctaaacttggtctgacagttaccaatgcttaatcagtgaggcacctatctcagcgatctgtctatttcgttcatccatagttgcctgactccccgtcgtgtagataactacgatacgggagggcttaccatctggccccagtgctgcaatgataccgcgagacccacgctcac

SEQ ID NO: 88 - DNA, 35 bp, Artificial sequence
  synthetic
  promoter (1)..(35): BBa_J23118 promoter
ttgacggctagctcagtcctaggtattgtgctagc

SEQ ID NO: 89 - DNA, 29 bp, Artificial sequence
  synthetic
  RBS (1)..(29): RBS (5009.62 au)
ccccataaccgtcgcataagaaggatttt

SEQ ID NO: 90 - DNA, 2910 bp, Artificial sequence
  synthetic
  CDS (1)..(2910): inv gene encoding Y. pseudotuberculosis invasin (Codon optimised)
atgagcatgtattttaacaaaatcatctcgtttaacattatttcccgtatcgtgatttgcatttttctgatctgtgggatgttcatggctggagccagtgagaaatacgatgcgaatgcgccgcagcaggtacagccctacagcgttagctccagcgccttcgaaaatcttcaccctaacaatgagatggagagttctatcaatcccttctcggcaagcgacaccgagcgcaacgccgctattatcgatcgtgctaacaaggagcaggaaacagaagctgtcaataagatgatctcgactggcgcgcgcttagctgcctccggacgtgcctctgacgtcgcccatagcatggttggggatgctgtaaaccaggagatcaagcaatggttaaaccgcttcggaactgctcaggtgaatttgaattttgacaaaaatttttctttaaaagagtcatcccttgattggttagcaccatggtacgactcagcgtcattcttattcttctctcagttgggcatccgcaataaggactcacgtaataccctgaaccttggcgttggaatccgtacgttagagaatggctggctgtatggactgaacacgttctacgataatgatttaacgggtcataaccatcgtatcggattgggtgccgaagcctggaccgactatcttcaattagccgcaaacggatattttcgtttgaacggttggcactctagccgcgatttctcggattacaaagaacgccccgcaacgggaggtgatcttcgtgcgaacgcgtaccttcccgcacttccccaacttggtggcaaattgatgtatgagcaatataccggggagcgcgtggccttgtttggcaaggataacttacaacgtaatccatatgccgttaccgccggcattaactacaccccagtaccattacttacggtcggagttgatcaacgtatgggtaagtcctcaaagcacgaaacgcaatggaatctgcagatgaactaccgtcttggggaatcgtttcagtcgcagttgtcgccatcggccgttgctggtactcgtttgttagcagaaagtcgttacaaccttgtagatcgcaataataatatcgttcttgagtatcagaaacaacaggtagttaagcttacccttagccccgcaactatttcaggcttacctggtcaggtgtatcaggtgaacgcccaagtccaaggggcttcagccgtacgcgagattgtctggagcgacgcggaacttattgctgcgggtggtacgctgactcctcttagcacaacccagttcaatcttgttctgcccccgtataaacgtacagcccaagtcagccgcgtcaccgatgaccttacggccaatttttatagtctgtccgccttggccgtagatcaccagggtaaccgtagcaattctttcacgttatccgtaacggtccagcagccccaattaacgttaactgcggcggtcattggcgacggggcgccagcaaacgggaagacagcgattaccgtggaattcacagtggccgactttgaagggaaaccccttgccggccaggaggtggttattacaacgaacaatggtgctttaccaaacaaaattaccgagaaaacggatgctaatggcgtagctcgcatcgctttgaccaataccaccgacggggtaacagtagttactgctgaggtcgaaggccagcgtcagtcagtggatacgcatttcgtcaaagggacgattgctgcagataaaagcaccctggccgctgtgcctacgtccatcatcgccgacgggcttatggcttcgactattacgctggaactgaaagatacatacggtgacccacaggccggagccaacgtagctttcgataccacactgggtaacatgggagtgattactgatcataacgatgggacatactccgctcccttaacgtccacgacgttgggggttgccactgtaaccgttaaagtggacggcgcggctttctcagtcccctctgtgaccgtaaacttcactgcagatcccatccccgacgctgggcgcagtagttttactgttagtacgccggacatcctggctgacggcaccatgtctagtaccctgtcgttcgtcccagtagataagaacggtcatttcatctcgggcatgcagggccttagttttactcagaacggtgttccagtatccatcagtccgatcacagagcaacccgatagttacaccgctaccgtcgttggtaactctgttggggacgttacaattacacctcaggttgataccttaattctttcaacactgcaaaaaaagatttcgctgttcccggttcctacgttgacagggattcttgttaacgggcagaacttcgctaccgacaaaggatttcctaagacaatcttcaaaaatgccacctttcaattgcaaatggacaatgatgttgcaaacaacacgcaatacgaatggtcttcttcgtttacgcccaatgtgtctgtcaacgaccaagggcaggtcacaattacttatcaaacatattcggaagttgctgtgacggcgaaaagcaaaaagtttccctcgtactctgtctcgtaccgtttttatcctaaccgttggatttacgacggcggccgctccttagtatcgagcctggaagcttctcgtcagtgccagggatcggatatgtcagctgtacttgaatcgagccgtgctacgaatgggacgcgcgctcctgacggtactttatggggagagtgggggagcttgacagcctattcctcggactggcagtcgggcgaatactgggtaaagaaaacaagtacagattttgaaacaatgaacatggatacgggggccctgcagccgggacctgcgtacttagcattccccttatgtgcgttaagtatttaa

SEQ ID NO: 91 - protein, 969 aa, Artificial sequence
  Synthetic Construct
MSMYFNKIISFNIISRIVICIFLICGMFMAGASEKYDANAPQQVQPYSVSSSAFENLHPNNEMESSINPFSASDTERNAAIIDRANKEQETEAVNKMISTGARLAASGRASDVAHSMVGDAVNQEIKQWLNRFGTAQVNLNFDKNFSLKESSLDWLAPWYDSASFLFFSQLGIRNKDSRNTLNLGVGIRTLENGWLYGLNTFYDNDLTGHNHRIGLGAEAWTDYLQLAANGYFRLNGWHSSRDFSDYKERPATGGDLRANAYLPALPQLGGKLMYEQYTGERVALFGKDNLQRNPYAVTAGINYTPVPLLTVGVDQRMGKSSKHETQWNLQMNYRLGESFQSQLSPSAVAGTRLLAESRYNLVDRNNNIVLEYQKQQVVKLTLSPATISGLPGQVYQVNAQVQGASAVREIVWSDAELIAAGGTLTPLSTTQFNLVLPPYKRTAQVSRVTDDLTANFYSLSALAVDHQGNRSNSFTLSVTVQQPQLTLTAAVIGDGAPANGKTAITVEFTVADFEGKPLAGQEVVITTNNGALPNKITEKTDANGVARIALTNTTDGVTVVTAEVEGQRQSVDTHFVKGTIAADKSTLAAVPTSIIADGLMASTITLELKDTYGDPQAGANVAFDTTLGNMGVITDHNDGTYSAPLTSTTLGVATVTVKVDGAAFSVPSVTVNFTADPIPDAGRSSFTVSTPDILADGTMSSTLSFVPVDKNGHFISGMQGLSFTQNGVPVSISPITEQPDSYTATVVGNSVGDVTITPQVDTLILSTLQKKISLFPVPTLTGILVNGQNFATDKGFPKTIFKNATFQLQMDNDVANNTQYEWSSSFTPNVSVNDQGQVTITYQTYSEVAVTAKSKKFPSYSVSYRFYPNRWIYDGGRSLVSSLEASRQCQGSDMSAVLESSRATNGTRAPDGTLWGEWGSLTAYSSDWQSGEYWVKKTSTDFETMNMDTGALQPGPAYLAFPLCALSI

SEQ ID NO: 92 - DNA, 20 bp, Artificial sequence
  synthetic
  RBS (1)..(20): RBS (5966.49 au)
gaccttgcggagaggtttat

SEQ ID NO: 93 - DNA, 1590 bp, Artificial sequence
  synthetic
  CDS (1)..(1590): gene encoding L. monocytogenes listeriolysin O (hly) with a W491A substitution
atgaaaaagatcatgttagtattcatcaccttgatcctggtttccctgcctattgcccaacaaaccgaagcgaaggacgcgagcgcattcaataaggaaaattcaatctcgtcaatggcgcctccagcgtctcctcccgcctcgcctaagactccgattgaaaaaaaacatgcagacgaaattgacaaatatatccaaggattagactataataagaacaacgttctggtataccacggggatgcggtcaccaacgttccaccgcgtaaaggatacaaggatgggaatgaatacattgtcgttgaaaaaaaaaagaagagcatcaatcaaaacaatgctgatattcaggtggttaacgcgatttcttcattaacatatccgggagccttggtaaaagccaactcagaattggttgaaaaccagccagatgtgttaccggtaaaacgcgactcactgacactgtcgatcgaccttcctggaatgacgaatcaggataacaaaatcgtcgtaaagaatgctactaagtccaatgttaacaatgccgtaaacactctggtcgaacgctggaatgaaaagtatgctcaagcttaccccaatgtgtctgcgaagatcgattacgatgatgaaatggcgtattccgagtcgcaattaatcgcgaaattcggcacagcatttaaggcagtgaataattccttgaacgtaaattttggcgcaatctcagaaggcaagatgcaagaagaggtcatctcgttcaaacaaatctattacaacgtgaacgttaacgaacctacgcgcccaagccgtttcttcggaaaggccgtcaccaaggaacagcttcaggcgctggaagttaacgctgagaatccaccggcgtatatttcgtcagtggcttacggccgccaggtatacttgaagctttctacgaacagtcattctaccaaggtgaaggcagctttcgacgctgcggtttcagggaaatcggtgtcgggggacgtcgaattaaccaacattattaagaacagctcgtttaaagcagttatctatggcggttctgctaaggacgaagtacaaattatcgatggaaatctgggtgaccttcgtgacatccttaagaagggtgcaactttcaatcgcgagacgccaggggtacccattgcgtatactaccaacttccttaaagataatgaattagctgttatcaagaacaattcggagtatattgaaacaacaagcaaagcttatacagacggaaaaattaatatcgatcactcaggcggatatgtggctcagtttaatatctcttgggatgaagtcaattatgacccggagggcaacgaaattgtacaacataagaactggtccgaaaataataaatcgaaacttgcccatttcacgtcgagtatttacttacctggcaacgcccgtaatattaacgtgtacgcaaaagaatgtactggtctggcttgggaagcgtggcgcactgtgattgacgaccgtaacttgccgttagtgaagaatcgtaacatttctatttgggggactactttgtacccaaaatatagcaataaggttgacaacccaatcgaatga

SEQ ID NO: 94 - protein, 529 aa, Artificial sequence
  Synthetic Construct
MKKIMLVFITLILVSLPIAQQTEAKDASAFNKENSISSMAPPASPPASPKTPIEKKHADEIDKYIQGLDYNKNNVLVYHGDAVTNVPPRKGYKDGNEYIVVEKKKKSINQNNADIQVVNAISSLTYPGALVKANSELVENQPDVLPVKRDSLTLSIDLPGMTNQDNKIVVKNATKSNVNNAVNTLVERWNEKYAQAYPNVSAKIDYDDEMAYSESQLIAKFGTAFKAVNNSLNVNFGAISEGKMQEEVISFKQIYYNVNVNEPTRPSRFFGKAVTKEQLQALEVNAENPPAYISSVAYGRQVYLKLSTNSHSTKVKAAFDAAVSGKSVSGDVELTNIIKNSSFKAVIYGGSAKDEVQIIDGNLGDLRDILKKGATFNRETPGVPIAYTTNFLKDNELAVIKNNSEYIETTSKAYTDGKINIDHSGGYVAQFNISWDEVNYDPEGNEIVQHKNWSENNKSKLAHFTSSIYLPGNARNINVYAKECTGLAWEAWRTVIDDRNLPLVKNRNISIWGTTLYPKYSNKVDNPIE

SEQ ID NO: 95 - DNA, 546 bp, Artificial sequence
  synthetic
  rep_origin (1)..(546): p15A ori
tttccataggctccgcccccctgacaagcatcacgaaatctgacgctcaaatcagtggtggcgaaacccgacaggactataaagataccaggcgtttccccctggcggctccctcgtgcgctctcctgttcctgcctttcggtttaccggtgtcattccgctgttatggccgcgtttgtctcattccacgcctgacactcagttccgggtaggcagttcgctccaagctggactgtatgcacgaaccccccgttcagtccgaccgctgcgccttatccggtaactatcgtcttgagtccaacccggaaagacatgcaaaagcaccactggcagcagccactggtaattgatttagaggagttagtcttgaagtcatgcgccggttaaggctaaactgaaaggacaagttttggtgactgcgctcctccaagccagttacctcggttcaaagagttggtagctcagagaaccttcgaaaaaccgccctgcaaggcggttttttcgttttcagagcaagagattacgcgcagaccaaaacgatctcaa

SEQ ID NO: 96 - DNA, 6582 bp, Artificial sequence
  synthetic
  misc_feature (1)..(6582): pV4 plasmid
ttacgccccgccctgccactcatcgcagtactgttgtaattcattaagcattctgccgacatggaagccatcacagacggcatgatgaacctgaatcgccagcggcatcagcaccttgtcgccttgcgtataatatttgcccatggtgaaaacgggggcgaagaagttgtccatattggccacgtttaaatcaaaactggtgaaactcacccagggattggctgagacgaaaaacatattctcaataaaccctttagggaaataggccaggttttcaccgtaacacgccacatcttgcgaatatatgtgtagaaactgccggaaatcgtcgtggtattcactccagagcgatgaaaacgtttcagtttgctcatggaaaacggtgtaacaagggtgaacactatcccatatcaccagctcaccgtctttcattgccatacggaattccggatgagcattcatcaggcgggcaagaatgtgaataaaggccggataaaacttgtgcttatttttctttacggtctttaaaaaggccgtaatatccagctgaacggtctggttataggtacattgagcaactgactgaaatgcctcaaaatgttctttacgatgccattgggatatatcaacggtggtatatccagtgatttttttctccattttagcttccttagctcctgaaaatctcgataactcaaaaaatacgcccggtagtgatcttatttcattatggtgaaagttggaacctcttacgttttgacgtctaagaaaccattattatcatgacattaacctataaaaataggcgtatcacgaggccctttcgtcttcacctcgagttgacggctagctcagtcctaggtattgtgctagcccccataaccgtcgcataagaaggattttatgagcatgtattttaacaaaatcatctcgtttaacattatttcccgtatcgtgatttgcatttttctgatctgtgggatgttcatggctggagccagtgagaaatacgatgcgaatgcgccgcagcaggtacagccctacagcgttagctccagcgccttcgaaaatcttcaccctaacaatgagatggagagttctatcaatcccttctcggcaagcgacaccgagcgcaacgccgctattatcgatcgtgctaacaaggagcaggaaacagaagctgtcaataagatgatctcgactggcgcgcgcttagctgcctccggacgtgcctctgacgtcgcccatagcatggttggggatgctgtaaaccaggagatcaagcaatggttaaaccgcttcggaactgctcaggtgaatttgaattttgacaaaaatttttctttaaaagagtcatcccttgattggttagcaccatggtacgactcagcgtcattcttattcttctctcagttgggcatccgcaataaggactcacgtaataccctgaaccttggcgttggaatccgtacgttagagaatggctggctgtatggactgaacacgttctacgataatgatttaacgggtcataaccatcgtatcggattgggtgccgaagcctggaccgactatcttcaattagccgcaaacggatattttcgtttgaacggttggcactctagccgcgatttctcggattacaaagaacgccccgcaacgggaggtgatcttcgtgcgaacgcgtaccttcccgcacttccccaacttggtggcaaattgatgtatgagcaatataccggggagcgcgtggccttgtttggcaaggataacttacaacgtaatccatatgccgttaccgccggcattaactacaccccagtaccattacttacggtcggagttgatcaacgtatgggtaagtcctcaaagcacgaaacgcaatggaatctgcagatgaactaccgtcttggggaatcgtttcagtcgcagttgtcgccatcggccgttgctggtactcgtttgttagcagaaagtcgttacaaccttgtagatcgcaataataatatcgttcttgagtatcagaaacaacaggtagttaagcttacccttagccccgcaactatttcaggcttacctggtcaggtgtatcaggtgaacgcccaagtccaaggggcttcagccgtacgcgagattgtctggagcgacgcggaacttattgctgcgggtggtacgctgactcctcttagcacaacccagttcaatcttgttctgcccccgtataaacgtacagcccaagtcagccgcgtcaccgatgaccttacggccaatttttatagtctgtccgccttggccgtagatcaccagggtaaccgtagcaattctttcacgttatccgtaacggtccagcagccccaattaacgttaactgcggcggtcattggcgacggggcgccagcaaacgggaagacagcgattaccgtggaattcacagtggccgactttgaagggaaaccccttgccggccaggaggtggttattacaacgaacaatggtgctttaccaaacaaaattaccgagaaaacggatgctaatggcgtagctcgcatcgctttgaccaataccaccgacggggtaacagtagttactgctgaggtcgaaggccagcgtcagtcagtggatacgcatttcgtcaaagggacgattgctgcagataaaagcaccctggccgctgtgcctacgtccatcatcgccgacgggcttatggcttcgactattacgctggaactgaaagatacatacggtgacccacaggccggagccaacgtagctttcgataccacactgggtaacatgggagtgattactgatcataacgatgggacatactccgctcccttaacgtccacgacgttgggggttgccactgtaaccgttaaagtggacggcgcggctttctcagtcccctctgtgaccgtaaacttcactgcagatcccatccccgacgctgggcgcagtagttttactgttagtacgccggacatcctggctgacggcaccatgtctagtaccctgtcgttcgtcccagtagataagaacggtcatttcatctcgggcatgcagggccttagttttactcagaacggtgttccagtatccatcagtccgatcacagagcaacccgatagttacaccgctaccgtcgttggtaactctgttggggacgttacaattacacctcaggttgataccttaattctttcaacactgcaaaaaaagatttcgctgttcccggttcctacgttgacagggattcttgttaacgggcagaacttcgctaccgacaaaggatttcctaagacaatcttcaaaaatgccacctttcaattgcaaatggacaatgatgttgcaaacaacacgcaatacgaatggtcttcttcgtttacgcccaatgtgtctgtcaacgaccaagggcaggtcacaattacttatcaaacatattcggaagttgctgtgacggcgaaaagcaaaaagtttccctcgtactctgtctcgtaccgtttttatcctaaccgttggatttacgacggcggccgctccttagtatcgagcctggaagcttctcgtcagtgccagggatcggatatgtcagctgtacttgaatcgagccgtgctacgaatgggacgcgcgctcctgacggtactttatggggagagtgggggagcttgacagcctattcctcggactggcagtcgggcgaatactgggtaaagaaaacaagtacagattttgaaacaatgaacatggatacgggggccctgcagccgggacctgcgtacttagcattccccttatgtgcgttaagtatttaagaccttgcggagaggtttatatgaaaaagatcatgttagtattcatcaccttgatcctggtttccctgcctattgcccaacaaaccgaagcgaaggacgcgagcgcattcaataaggaaaattcaatctcgtcaatggcgcctccagcgtctcctcccgcctcgcctaagactccgattgaaaaaaaacatgcagacgaaattgacaaatatatccaaggattagactataataagaacaacgttctggtataccacggggatgcggtcaccaacgttccaccgcgtaaaggatacaaggatgggaatgaatacattgtcgttgaaaaaaaaaagaagagcatcaatcaaaacaatgctgatattcaggtggttaacgcgatttcttcattaacatatccgggagccttggtaaaagccaactcagaattggttgaaaaccagccagatgtgttaccggtaaaacgcgactcactgacactgtcgatcgaccttcctggaatgacgaatcaggataacaaaatcgtcgtaaagaatgctactaagtccaatgttaacaatgccgtaaacactctggtcgaacgctggaatgaaaagtatgctcaagcttaccccaatgtgtctgcgaagatcgattacgatgatgaaatggcgtattccgagtcgcaattaatcgcgaaattcggcacagcatttaaggcagtgaataattccttgaacgtaaattttggcgcaatctcagaaggcaagatgcaagaagaggtcatctcgttcaaacaaatctattacaacgtgaacgttaacgaacctacgcgcccaagccgtttcttcggaaaggccgtcaccaaggaacagcttcaggcgctggaagttaacgctgagaatccaccggcgtatatttcgtcagtggcttacggccgccaggtatacttgaagctttctacgaacagtcattctaccaaggtgaaggcagctttcgacgctgcggtttcagggaaatcggtgtcgggggacgtcgaattaaccaacattattaagaacagctcgtttaaagcagttatctatggcggttctgctaaggacgaagtacaaattatcgatggaaatctgggtgaccttcgtgacatccttaagaagggtgcaactttcaatcgcgagacgccaggggtacccattgcgtatactaccaacttccttaaagataatgaattagctgttatcaagaacaattcggagtatattgaaacaacaagcaaagcttatacagacggaaaaattaatatcgatcactcaggcggatatgtggctcagtttaatatctcttgggatgaagtcaattatgacccggagggcaacgaaattgtacaacataagaactggtccgaaaataataaatcgaaacttgcccatttcacgtcgagtatttacttacctggcaacgcccgtaatattaacgtgtacgcaaaagaatgtactggtctggcttgggaagcgtggcgcactgtgattgacgaccgtaacttgccgttagtgaagaatcgtaacatttctatttgggggactactttgtacccaaaatatagcaataaggttgacaacccaatcgaatgagctagaggcatcaaataaaacgaaaggctcagtcgaaagactgggcctttcgttttatctgttgtttgtcggtgaacgctctcctgagtaggacaaatccgccgccctagacgcgctagcggagtgtatactggcttactatgttggcactgatgagggtgtcagtgaagtgcttcatgtggcaggagaaaaaaggctgcaccggtgcgtcagcagaatatgtgatacaggatatattccgcttcctcgctcactgactcgctacgctcggtcgttcgactgcggcgagcggaaatggcttacgaacggggcggagatttcctggaagatgccaggaagatacttaacagggaagtgagagggccgcggcaaagccgtttttccataggctccgcccccctgacaagcatcacgaaatctgacgctcaaatcagtggtggcgaaacccgacaggactataaagataccaggcgtttccccctggcggctccctcgtgcgctctcctgttcctgcctttcggtttaccggtgtcattccgctgttatggccgcgtttgtctcattccacgcctgacactcagttccgggtaggcagttcgctccaagctggactgtatgcacgaaccccccgttcagtccgaccgctgcgccttatccggtaactatcgtcttgagtccaacccggaaagacatgcaaaagcaccactggcagcagccactggtaattgatttagaggagttagtcttgaagtcatgcgccggttaaggctaaactgaaaggacaagttttggtgactgcgctcctccaagccagttacctcggttcaaagagttggtagctcagagaaccttcgaaaaaccgccctgcaaggcggttttttcgttttcagagcaagagattacgcgcagaccaaaacgatctcaagaagatcatcttattaatcagataaaatatttctagatttcagtgcaatttatctcttcaaatgtagcacctgaagtcagccccatacgatataagttgtctagtgcttggattctcaccaataaaaaacgcccggcggcaaccgagcgttctgaacaaatccagatggagttctgaggtcattactggatctatcaacaggagtccaagcgagctctaaacttggtctgacag

SEQ ID NO: 97 - DNA, 95 bp, Artificial sequence
  synthetic
  terminator (1)..(95): lambda t0 terminator
attctcaccaataaaaaacgcccggcggcaaccgagcgttctgaacaaatccagatggagttctgaggtcattactggatctatcaacaggagtc

SEQ ID NO: 98 - DNA, 8867 bp, Artificial sequence
  synthetic
  misc_feature (1)..(8867): pSQ11 plasmid (pSQ11_inv-hly plasmid)
aaaggcatcaaataaaacgaaaggctcagtcgaaagactgggcctttcgttttatctgttgtttgtcggtgaacgctctcctgagtaggacaaatccgccgccctagacagctgggcgcgccgcgcctgtagtgccatttacccccattcactgccagagccgtgagcgcagcgaactgaatgtcacgaaaaagacagcgactcaggtgcctgatggtcggagacaaaaggaatattcagcgatttgcccgagcttgcgagggtgctacttaagcctttagggttttaaggtctgttttgtagaggagcaaacagcgtttgcgacatccttttgtaatactgcggaactgactaaagtagtgagttatacacagggctgggatctattctttttatctttttttattctttctttattctataaattataaccacttgaatataaacaaaaaaaacacacaaaggtctagcggaatttacagagggtctagcagaatttacaagttttccagcaaaggtctagcagaatttacagatacccacaactcaaaggaaaaggacatgtaattatcattgactagcccatctcaattggtatagtgattaaaatcacctagaccaattgagatgtatgtctgaattagttgttttcaaagcaaatgaactagcgattagtcgctatgacttaacggagcatgaaaccaagctaattttatgctgtgtggcactactcaaccccacgattgaaaaccctacaaggaaagaacggacggtatcgttcacttataaccaatacgctcagatgatgaacatcagtagggaaaatgcttatggtgtattagctaaagcaaccagagagctgatgacgagaactgtggaaatcaggaatcctttggttaaaggctttgagattttccagtggacaaactatgccaagttctcaagcgaaaaattagaattagtttttagtgaagagatattgccttatcttttccagttaaaaaaattcataaaatataatctggaacatgttaagtcttttgaaaacaaatactctatgaggatttatgagtggttattaaaagaactaacacaaaagaaaactcacaaggcaaatatagagattagccttgatgaatttaagttcatgttaatgcttgaaaataactaccatgagtttaaaaggcttaaccaatgggttttgaaaccaataagtaaagatttaaacacttacagcaatatgaaattggtggttgataagcgaggccgcccgactgatacgttgattttccaagttgaactagatagacaaatggatctcgtaaccgaacttgagaacaaccagataaaaatgaatggtgacaaaataccaacaaccattacatcagattcctacctacataacggactaagaaaaacactacacgatgctttaactgcaaaaattcagctcaccagttttgaggcaaaatttttgagtgacatgcaaagtaagtatgatctcaatggttcgttctcatggctcacgcaaaaacaacgaaccacactagagaacatactggctaaatacggaaggatctgaggctcatcaaggcaaccatcaggattaatgcggatattgcggagtaacacttcagactgaaagtagaaataaaaaccgcagcagacaactgacaacatcaaatgaagggggcttattctaattgatattatttatatgataatagttcattttgtattttgtttttttgatattctcacctgcttagttacaataaatcaattctatcgctgtatggtatagactgttttattatatattttgaatatttttaatctgcccagtctggttttttaaaaaagtgctatcctcttaatgtctttactaaattagaaaacaagtttcactttcaactattgcatctttaattaatggtcaaggtgatttcaaatgctcgtttgtggccagttatacctcaaataactcaagttgttgagcacagccaacgcacatgcagtttgacgtatgacaggtatgctttatttcatttaaattatgatggttttccagccaatcagtgagtttctcttgataaggaatgcgggaatgtctatgtattttaataaaataatttcatttaatattatttcacgaatagttatttgtatctttttgatatgtggaatgttcatggctggggcttcagaaaaatatgatgctaacgcaccgcaacaggtccagccttattctgtctcttcatctgcatttgaaaatctccatcctaataatgaaatggagagttcaatcaatcccttttccgcatcggatacagaaagaaatgctgcaataatagatcgcgccaataaggagcaggagactgaagcggtgaataagatgataagcaccggggccaggttagctgcatcaggcagggcatctgatgttgctcactcaatggtgggcgatgcggttaatcaagaaatcaaacagtggttaaatcgattcggtacggctcaagttaatctgaattttgacaaaaatttttcgctaaaagaaagctctcttgattggctggctccttggtatgactctgcttcattcctcttttttagtcagttaggtattcgcaataaagacagccgcaacacacttaaccttggcgtcgggatacgtacattggagaacggttggctgtacggacttaatactttttatgataatgatttgaccggccacaaccaccgtatcggtcttggtgccgaggcctggaccgattatttacagttggctgccaatgggtattttcgcctcaatggatggcactcgtcgcgtgatttctccgactataaagagcgcccagccactgggggggatttgcgcgcgaatgcttatttacctgcactcccacaactgggggggaagttgatgtatgagcaatacaccggtgagcgtgttgctttatttggtaaagataatctgcaacgcaacccttatgccgtgactgccgggatcaattacacccccgtgcctctactcactgtcggggtagatcagcgtatggggaaaagcagtaagcatgaaacacagtggaacctccaaatgaactatcgcctgggcgagagttttcagtcgcaacttagcccttcagcggtggcaggaacacgtctactggcggagagccgctataaccttgtcgatcgtaacaataatatcgtgttggagtatcagaaacagcaggtggttaaactgacattatcgccagcaactatctccggcctgccgggtcaggtttatcaggtgaacgcacaagtacaaggggcatctgctgtaagggaaattgtctggagtgatgccgaactgattgccgctggcggcacattaacaccactgagtaccacacaattcaacttggttttaccgccttataaacgcacagcacaagtgagtcgggtaacggacgacctgacagccaacttttattcgcttagtgcgctcgcggttgatcaccaaggaaaccgatctaactcattcacattgagcgtcaccgttcagcagcctcagttgacattaacggcggccgtcattggtgatggcgcaccggctaatgggaaaactgcaatcaccgttgagttcaccgttgctgattttgaggggaaacccttagccgggcaggaggtggtgataaccaccaataatggtgcgctaccgaataaaatcacggaaaagacagatgcaaatggcgtcgcgcgcattgcattaaccaatacgacagatggcgtgacggtagtcacagcagaagtggaggggcaacggcaaagtgttgatacccactttgttaagggtactatcgcggcggataaatccactctggctgcggtaccgacatctatcatcgctgatggtctaatggcttcaaccatcacgttggagttgaaggatacctatggggacccgcaggctggcgcgaatgtggcttttgacacaaccttaggcaatatgggcgttatcacggatcacaatgacggcacttatagcgcaccattgaccagtaccacgttgggggtagcaacagtaacggtgaaagtggatggggctgcgttcagtgtgccgagtgtgacggttaatttcacggcagatcctattccagatgctggccgctccagtttcaccgtctccacaccggatatcttggctgatggcacgatgagttccacattatcctttgtccctgtcgataagaatggccattttatcagtgggatgcagggcttgagttttactcaaaacggtgtgccggtgagtattagccccattaccgagcagccagatagctataccgcgacggtggttgggaatagtgtcggtgatgtcacaatcacgccgcaggttgataccctgatactgagtacattgcagaaaaaaatatccctattcccggtacctacgctgaccggtattctggttaacgggcaaaatttcgctacggataaagggttcccgaaaacgatctttaaaaacgccacattccagttacagatggataacgatgttgctaataatactcagtatgagtggtcgtcgtcattcacacccaatgtatcggttaacgatcagggtcaggtgacgattacctaccaaacctatagcgaagtggctgtgacggcgaaaagtaaaaaattcccaagttattcggtgagttatcggttctacccaaatcggtggatatacgatggcggcagatcgctggtatccagtctcgaggccagcagacaatgccaaggttcagatatgtctgcggttcttgaatcctcacgtgcaaccaacggaacgcgtgcgcctgacgggacattgtggggcgagtgggggagcttgaccgcgtatagttctgattggcaatctggtgaatattgggtcaaaaagaccagcacggattttgaaaccatgaatatggacacaggcgcactgcaaccagggcctgcatacttggcgttcccgctctgtgcgctgtcaatataaccagataacagatagcaataagaacagtttaatgagctgattatttggggcgcgaatgggagtccggcaatcctagactcgccccataagtagcaaacgtccagagaacaacgccgctcaggttaattgagcggcgttgtttttttaaaaggatttgtcgcgataagcgtgagctggcgttaaatgccgatcttacggcccaggctgacgccgttggatacaccaaggaaagtctacacgaaccctttggcaaaatcctgtatatggccccctcctttgattagtatattcctatcttaaagtgacttttatgttgaggcattaacatttgttaacgacgataaagggacagcaggactagaataaagctataaagcaagcatataatattgcgtttcatctttagaagcgaatttcgccaatattataattatcaaaagagaggggtggcaaacggtatttggcattattaggttaaaaaatgtagaaggagagtgaaacccatgaaaaaaataatgctagtttttattacacttatattagttagtctaccaattgcgcaacaaactgaagcaaaggatgcatctgcattcaataaagaaaattcaatttcatccatggcaccaccagcatctccgcctgcaagtcctaagacgccaatcgaaaagaaacacgcggatgaaatcgataagtatatacaaggattggattacaataaaaacaatgtattagtataccacggagatgcagtgacaaatgtgccgccaagaaaaggttacaaagatggaaatgaatatattgttgtggagaaaaagaagaaatccatcaatcaaaataatgcagacattcaagttgtgaatgcaatttcgagcctaacctatccaggtgctctcgtaaaagcgaattcggaattagtagaaaatcaaccagatgttctccctgtaaaacgtgattcattaacactcagcattgatttgccaggtatgactaatcaagacaataaaatcgttgtaaaaaatgccactaaatcaaacgttaacaacgcagtaaatacattagtggaaagatggaatgaaaaatatgctcaagcttatccaaatgtaagtgcaaaaattgattatgatgacgaaatggcttacagtgaatcacaattaattgcgaaatttggtacagcatttaaagctgtaaataatagcttgaatgtaaacttcggcgcaatcagtgaagggaaaatgcaagaagaagtcattagttttaaacaaatttactataacgtgaatgttaatgaacctacaagaccttccagatttttcggcaaagctgttactaaagagcagttgcaagcgcttggagtgaatgcagaaaatcctcctgcatatatctcaagtgtggcgtatggccgtcaagtttatttgaaattatcaactaattcccatagtactaaagtaaaagctgcttttgatgctgccgtaagcggaaaatctgtctcaggtgatgtagaactaacaaatatcatcaaaaattcttccttcaaagccgtaatttacggaggttccgcaaaagatgaagttcaaatcatcgacggcaacctcggagacttacgcgatattttgaaaaaaggcgctacttttaatcgagaaacaccaggagttcccattgcttatacaacaaacttcctaaaagacaatgaattagctgttattaaaaacaactcagaatatattgaaacaacttcaaaagcttatacagatggaaaaattaacatcgatcactctggaggatacgttgctcaattcaacatttcttgggatgaagtaaattatgatcctgaaggtaacgaaattgttcaacataaaaactggagcgaaaacaataaaagcaagctagctcatttcacatcgtccatctatttgccaggtaacgcgagaaatattaatgtttacgctaaagaatgcactggtttagcttgggaatggtggagaacggtaattgatgaccggaacttaccacttgtgaaaaatagaaatatctccatctggggcaccacgctttatccgaaatatagtaataaagtagataatccaatcgaataattgtaaaagtaataaaaaattaagaataaaaccgcttaacacacacgaaaaaataagcttgttttgcactcttcgtaaattattttgtgaagaatgtagaaacaggcttattttttaatttttttagaagaattaacaaatgtaaaagaatatctgactgtttatccatataatataagcatatcccaaagtttaagccacctatagtttctactgcaaaacgtataatttagttcccacatatactaaaaaacgtgtccttaactctctctgtcagattagttgtaggtggcttaaacttagttttacgaattaaaaaggagcggtgaaatgaaaagtaaacttatttgtatcatcatggtaatagcttttcaggctcatttcactatgacggtaaaagcagattctgtcggggaagaaaaacttcaaaataatacacaagccaaaaagacccctgctgatttaaaagctttgccagattcctgcgaagcaaaagatttttataaaaattttaaaattcttgatatgacaaaagataagctaggcgttacgcattatacgctcgcgctaagttctggtggttacttgaccgataatgatgaaatcaaggtcctcgtgcgaaaaaggatggatataccgaaaaaatcgctataatgaccccgaagcagggttatgcagcggaaaaggacaacggtccaattaattattagaaaaattcatccagcatcagatgaaattgcagtttgttcatatccggattatcaatgccatatttctgaaacagacgtttttgcaggctcgggctaaattcgcccaggcagttccacagaatggccagatcctgataacgatccgcaatgcccacacggcccacatcaatgcagccaatcagtttgccttcatcgaaaatcaggttatccaggctaaaatcgccgtgggtcaccacgctatccgggctaaacggcagcagtttatgcatttctttccacacctgttccaccggccagccgttacgttcatcatcaaaatcgctcgcatccaccaggccgttgttcatacggctctgcgcctgggccagacgaaacacacgatcgctgttaaacgggcagttgcacaccggaatgctatgcagacgacgcagaaacacggccagcgcatccacaatgttttcgccgctatccggatattcttccagcacctgaaacgcggttttgcccggaatcgcggtggtcagcagccacgcatcatccggggtgcgaataaaatgtttaatggtcggcagcggcataaattcggtcagccagttcagacgcaccatttcatcggtcacatcgttcgccacgctgcctttgccatgtttcagaaacagttccggcgcatccggtttgccatacagacgataaatggtcgcgccgctctgacccacgttatcacgcgcccatttatagccatacagatccgcatccatgttgctgttcagacgcggacggctacagctcgtttcacgctgaatatggctcataacaccccttgtattactgtttatgtaagcagacagttttattgttcatgatgatatatttttatcttgtgcaatgtaacatcagagattttgagacacaaatttaaatcgtaattattggggacccctggattctcaccaataaaaaacgcccggcggcaaccgagcgttctgaacaaatccagatggagttctgaggtcattactggatctatcaacaggagtccaaaggcat

SEQ ID NO: 99 - DNA, 3595 bp, Artificial sequence
  synthetic
  misc_feature (1)..(3595): a BamHI fragment of Y. pseudotuberculosis plasmid pr1203 containing native inv expression cassette
attaatgcggatattgcggagtaacacttcagactgaaagtagaaataaaaaccgcagcagacaactgacaacatcaaatgaagggggcttattctaattgatattatttatatgataatagttcattttgtattttgtttttttgatattctcacctgcttagttacaataaatcaattctatcgctgtatggtatagactgttttattatatattttgaatatttttaatctgcccagtctggttttttaaaaaagtgctatcctcttaatgtctttactaaattagaaaacaagtttcactttcaactattgcatctttaattaatggtcaaggtgatttcaaatgctcgtttgtggccagttatacctcaaataactcaagttgttgagcacagccaacgcacatgcagtttgacgtatgacaggtatgctttatttcatttaaattatgatggttttccagccaatcagtgagtttctcttgataaggaatgcgggaatgtctatgtattttaataaaataatttcatttaatattatttcacgaatagttatttgtatctttttgatatgtggaatgttcatggctggggcttcagaaaaatatgatgctaacgcaccgcaacaggtccagccttattctgtctcttcatctgcatttgaaaatctccatcctaataatgaaatggagagttcaatcaatcccttttccgcatcggatacagaaagaaatgctgcaataatagatcgcgccaataaggagcaggagactgaagcggtgaataagatgataagcaccggggccaggttagctgcatcaggcagggcatctgatgttgctcactcaatggtgggcgatgcggttaatcaagaaatcaaacagtggttaaatcgattcggtacggctcaagttaatctgaattttgacaaaaatttttcgctaaaagaaagctctcttgattggctggctccttggtatgactctgcttcattcctcttttttagtcagttaggtattcgcaataaagacagccgcaacacacttaaccttggcgtcgggatacgtacattggagaacggttggctgtacggacttaatactttttatgataatgatttgaccggccacaaccaccgtatcggtcttggtgccgaggcctggaccgattatttacagttggctgccaatgggtattttcgcctcaatggatggcactcgtcgcgtgatttctccgactataaagagcgcccagccactgggggggatttgcgcgcgaatgcttatttacctgcactcccacaactgggggggaagttgatgtatgagcaatacaccggtgagcgtgttgctttatttggtaaagataatctgcaacgcaacccttatgccgtgactgccgggatcaattacacccccgtgcctctactcactgtcggggtagatcagcgtatggggaaaagcagtaagcatgaaacacagtggaacctccaaatgaactatcgcctgggcgagagttttcagtcgcaacttagcccttcagcggtggcaggaacacgtctactggcggagagccgctataaccttgtcgatcgtaacaataatatcgtgttggagtatcagaaacagcaggtggttaaactgacattatcgccagcaactatctccggcctgccgggtcaggtttatcaggtgaacgcacaagtacaaggggcatctgctgtaagggaaattgtctggagtgatgccgaactgattgccgctggcggcacattaacaccactgagtaccacacaattcaacttggttttaccgccttataaacgcacagcacaagtgagtcgggtaacggacgacctgacagccaacttttattcgcttagtgcgctcgcggttgatcaccaaggaaaccgatctaactcattcacattgagcgtcaccgttcagcagcctcagttgacattaacggcggccgtcattggtgatggcgcaccggctaatgggaaaactgcaatcaccgttgagttcaccgttgctgattttgaggggaaacccttagccgggcaggaggtggtgataaccaccaataatggtgcgctaccgaataaaatcacggaaaagacagatgcaaatggcgtcgcgcgcattgcattaaccaatacgacagatggcgtgacggtagtcacagcagaagtggaggggcaacggcaaagtgttgatacccactttgttaagggtactatcgcggcggataaatccactctggctgcggtaccgacatctatcatcgctgatggtctaatggcttcaaccatcacgttggagttgaaggatacctatggggacccgcaggctggcgcgaatgtggcttttgacacaaccttaggcaatatgggcgttatcacggatcacaatgacggcacttatagcgcaccattgaccagtaccacgttgggggtagcaacagtaacggtgaaagtggatggggctgcgttcagtgtgccgagtgtgacggttaatttcacggcagatcctattccagatgctggccgctccagtttcaccgtctccacaccggatatcttggctgatggcacgatgagttccacattatcctttgtccctgtcgataagaatggccattttatcagtgggatgcagggcttgagttttactcaaaacggtgtgccggtgagtattagccccattaccgagcagccagatagctataccgcgacggtggttgggaatagtgtcggtgatgtcacaatcacgccgcaggttgataccctgatactgagtacattgcagaaaaaaatatccctattcccggtacctacgctgaccggtattctggttaacgggcaaaatttcgctacggataaagggttcccgaaaacgatctttaaaaacgccacattccagttacagatggataacgatgttgctaataatactcagtatgagtggtcgtcgtcattcacacccaatgtatcggttaacgatcagggtcaggtgacgattacctaccaaacctatagcgaagtggctgtgacggcgaaaagtaaaaaattcccaagttattcggtgagttatcggttctacccaaatcggtggatatacgatggcggcagatcgctggtatccagtctcgaggccagcagacaatgccaaggttcagatatgtctgcggttcttgaatcctcacgtgcaaccaacggaacgcgtgcgcctgacgggacattgtggggcgagtgggggagcttgaccgcgtatagttctgattggcaatctggtgaatattgggtcaaaaagaccagcacggattttgaaaccatgaatatggacacaggcgcactgcaaccagggcctgcatacttggcgttcccgctctgtgcgctgtcaatataaccagataacagatagcaataagaacagtttaatgagctgattatttggggcgcgaatgggagtccggcaatcctagactcgccccataagtagcaaacgtccagagaacaacgccgctcaggttaattgagcggcgttgtttttttaaaaggatttgtcgcgataagcgtgagctggcgttaa

SEQ ID NO: 100 - DNA, 2442 bp, Artificial sequence
  synthetic
  misc_feature (1)..(2442): Sau96I chromosomal fragment of Listeria monocytogenes EGDe (NC_003210.1) containing the native hly expression cassette
tggccccctcctttgattagtatattcctatcttaaagtgacttttatgttgaggcattaacatttgttaacgacgataaagggacagcaggactagaataaagctataaagcaagcatataatattgcgtttcatctttagaagcgaatttcgccaatattataattatcaaaagagaggggtggcaaacggtatttggcattattaggttaaaaaatgtagaaggagagtgaaacccatgaaaaaaataatgctagtttttattacacttatattagttagtctaccaattgcgcaacaaactgaagcaaaggatgcatctgcattcaataaagaaaattcaatttcatccatggcaccaccagcatctccgcctgcaagtcctaagacgccaatcgaaaagaaacacgcggatgaaatcgataagtatatacaaggattggattacaataaaaacaatgtattagtataccacggagatgcagtgacaaatgtgccgccaagaaaaggttacaaagatggaaatgaatatattgttgtggagaaaaagaagaaatccatcaatcaaaataatgcagacattcaagttgtgaatgcaatttcgagcctaacctatccaggtgctctcgtaaaagcgaattcggaattagtagaaaatcaaccagatgttctccctgtaaaacgtgattcattaacactcagcattgatttgccaggtatgactaatcaagacaataaaatcgttgtaaaaaatgccactaaatcaaacgttaacaacgcagtaaatacattagtggaaagatggaatgaaaaatatgctcaagcttatccaaatgtaagtgcaaaaattgattatgatgacgaaatggcttacagtgaatcacaattaattgcgaaatttggtacagcatttaaagctgtaaataatagcttgaatgtaaacttcggcgcaatcagtgaagggaaaatgcaagaagaagtcattagttttaaacaaatttactataacgtgaatgttaatgaacctacaagaccttccagatttttcggcaaagctgttactaaagagcagttgcaagcgcttggagtgaatgcagaaaatcctcctgcatatatctcaagtgtggcgtatggccgtcaagtttatttgaaattatcaactaattcccatagtactaaagtaaaagctgcttttgatgctgccgtaagcggaaaatctgtctcaggtgatgtagaactaacaaatatcatcaaaaattcttccttcaaagccgtaatttacggaggttccgcaaaagatgaagttcaaatcatcgacggcaacctcggagacttacgcgatattttgaaaaaaggcgctacttttaatcgagaaacaccaggagttcccattgcttatacaacaaacttcctaaaagacaatgaattagctgttattaaaaacaactcagaatatattgaaacaacttcaaaagcttatacagatggaaaaattaacatcgatcactctggaggatacgttgctcaattcaacatttcttgggatgaagtaaattatgatcctgaaggtaacgaaattgttcaacataaaaactggagcgaaaacaataaaagcaagctagctcatttcacatcgtccatctatttgccaggtaacgcgagaaatattaatgtttacgctaaagaatgcactggtttagcttgggaatggtggagaacggtaattgatgaccggaacttaccacttgtgaaaaatagaaatatctccatctggggcaccacgctttatccgaaatatagtaataaagtagataatccaatcgaataattgtaaaagtaataaaaaattaagaataaaaccgcttaacacacacgaaaaaataagcttgttttgcactcttcgtaaattattttgtgaagaatgtagaaacaggcttattttttaatttttttagaagaattaacaaatgtaaaagaatatctgactgtttatccatataatataagcatatcccaaagtttaagccacctatagtttctactgcaaaacgtataatttagttcccacatatactaaaaaacgtgtccttaactctctctgtcagattagttgtaggtggcttaaacttagttttacgaattaaaaaggagcggtgaaatgaaaagtaaacttatttgtatcatcatggtaatagcttttcaggctcatttcactatgacggtaaaagcagattctgtcggggaagaaaaacttcaaaataatacacaagccaaaaagacccctgctgatttaaaagctttgccagattcctgcgaagcaaaagatttttataaaaattttaaaattcttgatatgacaaaagataagctaggcgttacgcattatacgctcgcgctaagttctggtggttacttgaccgataatgatgaaatcaaggtcc

SEQ ID NO: 101 - DNA, 285 bp, Artificial sequence
  synthetic
  CDS (1)..(285): Mpl (Zinc metalloproteinase precursor)
atgaaaagtaaacttatttgtatcatcatggtaatagcttttcaggctcatttcactatgacggtaaaagcagattctgtcggggaagaaaaacttcaaaataatacacaagccaaaaagacccctgctgatttaaaagctttgccagattcctgcgaagcaaaagatttttataaaaattttaaaattcttgatatgacaaaagataagctaggcgttacgcattatacgctcgcgctaagttctggtggttacttgaccgataatgatgaaatcaaggtcctc

SEQ ID NO: 102 - protein, 95 aa, Artificial sequence
  Synthetic Construct
MKSKLICIIMVIAFQAHFTMTVKADSVGEEKLQNNTQAKKTPADLKALPDSCEAKDFYKNFKILDMTKDKLGVTHYTLALSSGGYLTDNDEIKVL

SEQ ID NO: 103 - DNA, 29 bp, Artificial sequence
  synthetic
  promoter (1)..(29): KanR promoter
ttgtgtctcaaaatctctgatgttacatt

SEQ ID NO: 104 - DNA, 816 bp, Artificial sequence
  synthetic
  CDS (1)..(816): KanR gene encoding kanamycin resistance
atgagccatattcagcgtgaaacgagctgtagccgtccgcgtctgaacagcaacatggatgcggatctgtatggctataaatgggcgcgtgataacgtgggtcagagcggcgcgaccatttatcgtctgtatggcaaaccggatgcgccggaactgtttctgaaacatggcaaaggcagcgtggcgaacgatgtgaccgatgaaatggtgcgtctgaactggctgaccgaatttatgccgctgccgaccattaaacattttattcgcaccccggatgatgcgtggctgctgaccaccgcgattccgggcaaaaccgcgtttcaggtgctggaagaatatccggatagcggcgaaaacattgtggatgcgctggccgtgtttctgcgtcgtctgcatagcattccggtgtgcaactgcccgtttaacagcgatcgtgtgtttcgtctggcccaggcgcagagccgtatgaacaacggcctggtggatgcgagcgattttgatgatgaacgtaacggctggccggtggaacaggtgtggaaagaaatgcataaactgctgccgtttagcccggatagcgtggtgacccacggcgattttagcctggataacctgattttcgatgaaggcaaactgattggctgcattgatgtgggccgtgtgggcattgcggatcgttatcaggatctggccattctgtggaactgcctgggcgaatttagcccgagcctgcaaaaacgtctgtttcagaaatatggcattgataatccggatatgaacaaactgcaatttcatctgatgctggatgaatttttctaa

SEQ ID NO: 105 - protein, 271 aa, Artificial sequence
  Synthetic Construct
MSHIQRETSCSRPRLNSNMDADLYGYKWARDNVGQSGATIYRLYGKPDAPELFLKHGKGSVANDVTDEMVRLNWLTEFMPLPTIKHFIRTPDDAWLLTTAIPGKTAFQVLEEYPDSGENIVDALAVFLRRLHSIPVCNCPFNSDRVFRLAQAQSRMNNGLVDASDFDDERNGWPVEQVWKEMHKLLPFSPDSVVTHGDFSLDNLIFDEGKLIGCIDVGRVGIADRYQDLAILWNCLGEFSPSLQKRLFQKYGIDNPDMNKLQFHLMLDEFF

SEQ ID NO: 106 - DNA, 8063 bp, Artificial sequence
  synthetic
  misc_feature (1)..(8063): pQS13 plasmid (pSQ13_pCOLA_inv-hlyW491A)
ggggaattgtgagcggataacaattcccctgtagaaataattttgtttaactttaataaggagatataccatgggagttgttgagcacagccaacgcacatttgacagctagctcagtcctaggtactgtgctagcccccataaccgtcgcataagaaggattttatgaaaaaaaccgcgattgcgattgcggtggcgctggcgggctttgcgaccgtggcgcaggcgagcgagaaatacgatgcaaacgcaccgcaacaggttcaaccttattccgtgtcttcctcagctttcgagaatctgcatcctaacaatgaaatggagtcctctatcaatcctttttccgcgtcggacacagagcgtaacgccgcgatcatcgatcgcgcaaacaaggaacaggagactgaggccgtgaataagatgatctcaaccggggcacgcttggctgcttcgggccgtgcttctgatgtggcgcactcgatggttggggacgcggttaatcaagagattaagcagtggttaaatcgtttcggtacggcgcaggttaatcttaatttcgacaaaaatttctctctgaaggagtcatctctggactggttggctccatggtacgattcggcgtcattcctttttttctcccaactgggaatccgcaataaagactcacgcaacacgcttaacttaggggtggggatccgcacactggagaatggctggctttacggcttaaatacgttttatgataacgacctgaccggccacaatcatcgcatcggtttaggggcagaggcttggactgattatttacaactggcagcgaatgggtacttccgccttaacggatggcacagctctcgtgacttcagcgactataaggagcgtccggctacgggaggagaccttcgtgctaatgcctaccttccggcacttccacagctgggcggaaaacttatgtatgaacaatataccggagagcgtgtcgcacttttcggtaaagacaacctgcaacgtaacccatatgctgtaaccgcgggcatcaactacacaccagtgccattgttaactgtcggggtggatcaacgcatgggcaagagttcaaagcatgagacacaatggaaccttcaaatgaactatcgcttgggtgagtcttttcaaagtcaactgagtccatctgccgtagctggcacacgtttattagctgaatcacgttacaatttagtcgaccgtaataataatatcgtcttggaatatcaaaagcaacaagttgttaaactgacgctttcgcccgctacgatcagtggtttgcccggccaagtctatcaagtgaacgcgcaagtacagggtgcgagcgccgtgcgcgagattgtatggagtgacgccgagttaatcgctgcggggggtacgctgactccgttaagcactacacagttcaacttagtgctgcctccgtacaaacgcacggctcaggtcagccgcgtaacggacgatttaactgctaacttctactcattgtccgctcttgctgtcgaccaccagggtaatcgctcgaactctttcactttgtcagttacggtccaacaaccacaattgacattaactgccgccgtgattggtgacggtgcccctgccaacgggaagaccgcgattactgtagagttcacggttgccgactttgagggcaaacctctggcggggcaggaggtggttattaccacaaataacggtgcgcttcccaacaaaatcacggagaaaactgatgcaaacggggtggcacgtatcgcacttaccaacacgactgacggagtgacagtggttaccgctgaggtagaaggtcaacgtcaaagtgtggacacacactttgtcaagggcacgatcgcggccgataaatcgacattggcggcagttccaacgtcaatcatcgccgatggtttgatggcatcgactattactttagagcttaaagacacctacggagacccgcaagcaggcgctaacgtcgcatttgataccacattagggaatatgggagttattactgaccacaatgatgggacatattccgctcccttaacttctacaactcttggagtagcaacggtaaccgtgaaagtagacggggctgctttttcggtccctagcgtaaccgtaaattttacagcggacccaattccggacgcgggacgcagctcgttcactgtgagtactcccgacattctggctgatggcactatgagtagcactcttagttttgtgcccgtcgataaaaacgggcattttatctcaggaatgcaaggactttcatttacccagaacggagtgccggtctctatttctcctattacggagcaacccgattcctatactgccacggtggttgggaactcagtaggtgacgtaactatcaccccacaggtagatactttgatcttatcaaccttgcagaaaaagatttccttgttccccgtccccacattaacagggatcttggtaaacggccaaaatttcgcgacagataaagggtttccaaaaaccatcttcaagaatgcgactttccagctgcagatggataacgacgtagctaataatacacaatacgaatggtcctcatccttcactcccaatgtttcagtcaatgaccagggccaggttacaattacctatcagacctactccgaagttgcggtgacggcaaaaagcaagaagttcccttcgtactccgtctcgtaccgcttttaccccaaccgttggatttacgatgggggccgttctcttgtgtcttcgttggaggcgtctcgccaatgccaaggttctgatatgtcagccgtattagagagctcacgcgcgacgaacgggactcgtgcgccagacggcacgctgtggggagaatgggggagtctgacagcatactcgtccgattggcagagtggtgaatattgggtcaaaaaaacctcgaccgatttcgaaacgatgaacatggataccggagcgctgcaaccgggcccagcatatctggcattccccttgtgtgccttatccatctaagaccttgcggagaggtttatatgaaatacctgctgccgaccgctgctgctggtctgctgctcctcgctgcccagccggcgatggccgatgcgtctgcctttaacaaagaaaatagtatttcctcgatggctcctccggcctcccctccagcttctccaaagacacctattgagaaaaaacatgctgacgaaattgataaatatatccaaggactggactataacaaaaacaatgttttggtgtatcacggcgacgccgtaacaaatgtgccgccacgcaaagggtataaggatggaaacgaatatattgtcgtggagaagaaaaaaaagtcgatcaaccaaaacaatgccgatattcaagtcgtgaacgcaatctctagtttgacgtatcctggagctttagttaaggccaattctgaattagtcgaaaatcaaccggatgtccttcctgtcaaacgcgacagtcttaccttatctattgatctgccgggcatgactaatcaagataataaaattgtcgtgaagaatgctactaagagtaacgtgaataacgcagtgaatacgcttgtcgagcgctggaacgagaaatatgcccaggcctatccaaacgtttccgccaagatcgattacgatgatgaaatggcgtatagtgagtcacagctgatcgcgaagtttggcaccgcctttaaagcagttaacaattcgttgaatgttaactttggagcaatttcggaaggcaagatgcaggaagaggttatctcgtttaagcaaatttattacaacgttaacgtcaatgagcctacacgtccttcacgcttctttggaaaagccgtcacgaaggagcagctgcaagctctgggagtaaacgctgaaaacccgcctgcctatattagttcggtagcatacgggcgtcaggtctacttgaagcttagcacaaactcacattctaccaaagtaaaggcggcattcgatgccgcggtgtcagggaaatcagtatcaggtgatgtagaattaacaaacattatcaaaaactctagctttaaggccgtcatttacggaggttctgcgaaggacgaagtgcagattatcgatggtaacttgggagatctgcgcgacatcttgaagaaaggagccacttttaatcgcgaaacgccgggggttccgatcgcgtatactaccaatttcctgaaagacaacgagttggcagtcattaaaaacaattccgagtacattgagacgacctcaaaagcgtatacggacgggaagatcaacattgaccactctgggggttatgtggcccaattcaacatcagctgggacgaggttaactatgaccctgaaggcaacgagattgtacagcataagaactggagtgaaaacaataaaagcaaattagcccattttacgtcgtcaatctatttaccaggtaacgctcgcaatatcaatgtttatgcgaaagagtgtaccggattggcgtgggaggcgtggcgcacagtcattgatgaccgtaacctgccgttggtaaagaaccgtaatatttcaatctgggggactaccctgtacccaaaatacagtaacaaggttgataatccgatcgaataattgtaaaagtaatgctagaggcatcaaataaaacgaaaggctcagtcgaaagactgggcctttcgttttatctgttgtttgtcggtgaacgctctcctgagtaggacaaatccgccgccctagacttaattaacctaggctgctgccaccgctgagcaataactagcataaccccttggggcctctaaacgggtcttgaggggttttttgctgaaacctcaggcatttgagaagcacacggtcacactgcttccggtagtcaataaaccggtaaaccagcaatagacataagcggctatttaacgaccctgccctgaaccgacgacaagctgacgaccgggtctccgcaagtggcacttttcggggaaatgtgcgcggaacccctatttgtttatttttctaaatacattcaaatatgtatccgctcatgaattaattcttagaaaaactcatcgagcatcaaatgaaactgcaatttattcatatcaggattatcaataccatatttttgaaaaagccgtttctgtaatgaaggagaaaactcaccgaggcagttccataggatggcaagatcctggtatcggtctgcgattccgactcgtccaacatcaatacaacctattaatttcccctcgtcaaaaataaggttatcaagtgagaaatcaccatgagtgacgactgaatccggtgagaatggcaaaagtttatgcatttctttccagacttgttcaacaggccagccattacgctcgtcatcaaaatcactcgcatcaaccaaaccgttattcattcgtgattgcgcctgagcgagacgaaatacgcggtcgctgttaaaaggacaattacaaacaggaatcgaatgcaaccggcgcaggaacactgccagcgcatcaacaatattttcacctgaatcaggatattcttctaatacctggaatgctgttttcccggggatcgcagtggtgagtaaccatgcatcatcaggagtacggataaaatgcttgatggtcggaagaggcataaattccgtcagccagtttagtctgaccatctcatctgtaacatcattggcaacgctacctttgccatgtttcagaaacaactctggcgcatcgggcttcccatacaatcgatagattgtcgcacctgattgcccgacattatcgcgagcccatttatacccatataaatcagcatccatgttggaatttaatcgcggcctagagcaagacgtttcccgttgaatatggctcatactcttcctttttcaatattattgaagcatttatcagggttattgtctcatgagcggatacatatttgaatgtatttagaaaaataaacaaataggcatgctagcgcagaaacgtcctagaagatgccaggaggatacttagcagagagacaataaggccggagcgaagccgtttttccataggctccgcccccctgacgaacatcacgaaatctgacgctcaaatcagtggtggcgaaacccgacaggactataaagataccaggcgtttccccctgatggctccctcttgcgctctcctgttcccgtcctgcggcgtccgtgttgtggtggaggctttacccaaatcaccacgtcccgttccgtgtagacagttcgctccaagctgggctgtgtgcaagaaccccccgttcagcccgactgctgcgccttatccggtaactatcatcttgagtccaacccggaaagacacgacaaaacgccactggcagcagccattggtaactgagaattagtggatttagatatcgagagtcttgaagtggtggcctaacagaggctacactgaaaggacagtatttggtatctgcgctccactaaagccagttaccaggttaagcagttccccaactgacttaaccttcgatcaaaccgcctccccaggcggttttttcgtttacagagcaggagattacgacgatcgtaaaaggatctcaagaagatcctttacggattcccgacaccatcactctagatttcagtgcaatttatctcttcaaatgtagcacctgaagtcagccccatacgatataagttgtaattctcatgttagtcatgccccgcgcccaccggaaggagctgactgggttgaaggctctcaagggcatcggtcgagatcccggtgcctaatgagtgagctaacttacattaattgcgttgcgctcactgcccgctttccagtcgggaaacctgtcgtgccagctgcattaatgaatcggccaacgcgcggggagaggcggtttgcgtattgggcgccagggtggtttttcttttcaccagtgagacgggcaacagctgattgcccttcaccgcctggccctgagagagttgcagcaagcggtccacgctggtttgccccagcaggcgaaaatcctgtttgatggtggttaacggcgggatataacatgagctgtcttcggtatcgtcgtatcccactaccgagatgtccgcaccaacgcgcagcccggactcggtaatggcgcgcattgcgcccagcgccatctgatcgttggcaaccagcatcgcagtgggaacgatgccctcattcagcatttgcatggtttgttgaaaaccggacatggcactccagtcgccttcccgttccgctatcggctgaatttgattgcgagtgagatatttatgccagccagccagacgcagacgcgccgagacagaacttaatgggcccgctaacagcgcgatttgctggtgacccaatgcgaccagatgctccacgcccagtcgcgtaccgtcttcatgggagaaaataatactgttgatgggtgtctggtcagagacatcaagaaataacgccggaacattagtgcaggcagcttccacagcaatggcatcctggtcatccagcggatagttaatgatcagcccactgacgcgttgcgcgagaagattgtgcaccgccgctttacaggcttcgacgccgcttcgttctaccatcgacaccaccacgctggcacccagttgatcggcgcgagatttaatcgccgcgacaatttgcgacggcgcgtgcagggccagactggaggtggcaacgccaatcagcaacgactgtttgcccgccagttgttgtgccacgcggttgggaatgtaattcagctccgccatcgccgcttccactttttcccgcgttttcgcagaaacgtggctggcctggttcaccacgcgggaaacggtctgataagagacaccggcatactctgcgacatcgtataacgttactggtttcacattcaccaccctgaattgactctcttccgggcgctatcatgccataccgcgaaaggttttgcgccattcgatggtgtccgggatctcgacgctctcccttatgcgactcctgcattaggaaattaatacgactcactata

SEQ ID NO: 107 - DNA, 35 bp, Artificial sequence
  synthetic
  promoter (1)..(35): BBa_J23102 promoter
ttgacagctagctcagtcctaggtactgtgctagc

SEQ ID NO: 108 - DNA, 29 bp, Artificial sequence
  synthetic
  RBS (1)..(29): RBS (992.40 au)
ccccataaccgtcgcataagaaggatttt

SEQ ID NO: 109 - DNA, 63 bp, Artificial sequence
  synthetic
  sig_peptide (1)..(63): OmpA signal peptide
atgaaaaaaaccgcgattgcgattgcggtggcgctggcgggctttgcgaccgtggcgcaggcg

SEQ ID NO: 110 - DNA, 20 bp, Artificial sequence
  synthetic
  rbs (1)..(20): RBS (2779.51 au)
gaccttgcggagaggtttat

SEQ ID NO: 111 - DNA, 25 bp, Artificial sequence
  synthetic
  misc_feature (1)..(25): LacI operator
ggaattgtgagcggataacaattcc

SEQ ID NO: 112 - DNA, 1083 bp, Artificial sequence
  synthetic
  CDS (1)..(1083): LacI gene
gtgaaaccagtaacgttatacgatgtcgcagagtatgccggtgtctcttatcagaccgtttcccgcgtggtgaaccaggccagccacgtttctgcgaaaacgcgggaaaaagtggaagcggcgatggcggagctgaattacattcccaaccgcgtggcacaacaactggcgggcaaacagtcgttgctgattggcgttgccacctccagtctggccctgcacgcgccgtcgcaaattgtcgcggcgattaaatctcgcgccgatcaactgggtgccagcgtggtggtgtcgatggtagaacgaagcggcgtcgaagcctgtaaagcggcggtgcacaatcttctcgcgcaacgcgtcagtgggctgatcattaactatccgctggatgaccaggatgccattgctgtggaagctgcctgcactaatgttccggcgttatttcttgatgtctctgaccagacacccatcaacagtattattttctcccatgaagacggtacgcgactgggcgtggagcatctggtcgcattgggtcaccagcaaatcgcgctgttagcgggcccattaagttctgtctcggcgcgtctgcgtctggctggctggcataaatatctcactcgcaatcaaattcagccgatagcggaacgggaaggcgactggagtgccatgtccggttttcaacaaaccatgcaaatgctgaatgagggcatcgttcccactgcgatgctggttgccaacgatcagatggcgctgggcgcaatgcgcgccattaccgagtccgggctgcgcgttggtgcggacatctcggtagtgggatacgacgataccgaagacagctcatgttatatcccgccgttaaccaccatcaaacaggattttcgcctgctggggcaaaccagcgtggaccgcttgctgcaactctctcagggccaggcggtgaagggcaatcagctgttgcccgtctcactggtgaaaagaaaaaccaccctggcgcccaatacgcaaaccgcctctccccgcgcgttggccgattcattaatgcagctggcacgacaggtttcccgactggaaagcgggcagtga

SEQ ID NO: 113 - protein, 360 aa, Artificial sequence
  Synthetic Construct
VKPVTLYDVAEYAGVSYQTVSRVVNQASHVSAKTREKVEAAMAELNYIPNRVAQQLAGKQSLLIGVATSSLALHAPSQIVAAIKSRADQLGASVVVSMVERSGVEACKAAVHNLLAQRVSGLIINYPLDDQDAIAVEAACTNVPALFLDVSDQTPINSIIFSHEDGTRLGVEHLVALGHQQIALLAGPLSSVSARLRLAGWHKYLTRNQIQPIAEREGDWSAMSGFQQTMQMLNEGIVPTAMLVANDQMALGAMRAITESGLRVGADISVVGYDDTEDSSCYIPPLTTIKQDFRLLGQTSVDRLLQLSQGQAVKGNQLLPVSLVKRKTTLAPNTQTASPRALADSLMQLARQVSRLESGQ

SEQ ID NO: 114 - DNA, 636 bp, Artificial sequence
  synthetic
  rep_origin (1)..(636): ColA ori
aaacgtcctagaagatgccaggaggatacttagcagagagacaataaggccggagcgaagccgtttttccataggctccgcccccctgacgaacatcacgaaatctgacgctcaaatcagtggtggcgaaacccgacaggactataaagataccaggcgtttccccctgatggctccctcttgcgctctcctgttcccgtcctgcggcgtccgtgttgtggtggaggctttacccaaatcaccacgtcccgttccgtgtagacagttcgctccaagctgggctgtgtgcaagaaccccccgttcagcccgactgctgcgccttatccggtaactatcatcttgagtccaacccggaaagacacgacaaaacgccactggcagcagccattggtaactgagaattagtggatttagatatcgagagtcttgaagtggtggcctaacagaggctacactgaaaggacagtatttggtatctgcgctccactaaagccagttaccaggttaagcagttccccaactgacttaaccttcgatcaaaccgcctccccaggcggttttttcgtttacagagcaggagattacgacgatcgtaaaaggatctcaagaagatcctttacggattcccgacacca

SEQ ID NO: 115 - DNA, 48 bp, Artificial sequence
  synthetic
  terminator (1)..(48): T7 terminator
ctagcataaccccttggggcctctaaacgggtcttgaggggttttttg

SEQ ID NO: 116 - DNA, 2725 bp, Artificial sequence
  synthetic
  misc_feature (1)..(2725): pZE3119-sfGFP plasmid
ccgcagcgggcatcacgcatggtatggatgaactgtacaaatgactgcagcccgggggatcccatggtacgcgtgctagaggcatcaaataaaacgaaaggctcagtcgaaagactgggcctttcgttttatctgttgtttgtcggtgaacgctctcctgagtaggacaaatccgccgccctagacctaggcgttcggctgcggcgagcggtatcagctcactcaaaggcggtaatacggttatccacagaatcaggggataacgcaggaaagaacatgtgagcaaaaggccagcaaaaggccaggaaccgtaaaaaggccgcgttgctggcgtttttccataggctccgcccccctgacgagcatcacaaaaatcgacgctcaagtcagaggtggcgaaacccgacaggactataaagataccaggcgtttccccctggaagctccctcgtgcgctctcctgttccgaccctgccgcttaccggatacctgtccgcctttctcccttcgggaagcgtggcgctttctcaatgctcacgctgtaggtatctcagttcggtgtaggtcgttcgctccaagctgggctgtgtgcacgaaccccccgttcagcccgaccgctgcgccttatccggtaactatcgtcttgagtccaacccggtaagacacgacttatcgccactggcagcagccactggtaacaggattagcagagcgaggtatgtaggcggtgctacagagttcttgaagtggtggcctaactacggctacactagaaggacagtatttggtatctgcgctctgctgaagccagttaccttcggaaaaagagttggtagctcttgatccggcaaacaaaccaccgctggtagcggtggtttttttgtttgcaagcagcagattacgcgcagaaaaaaaggatctcaagaagatcctttgatcttttctacggggtctgacgctcagtggaacgaaaactcacgttaagggattttggtcatgactagtgcttggattctcaccaataaaaaacgcccggcggcaaccgagcgttctgaacaaatccagatggagttctgaggtcattactggatctatcaacaggagtccaagcgagctcgatatcaaattacgccccgccctgccactcatcgcagtactgttgtaattcattaagcattctgccgacatggaagccatcacagacggcatgatgaacctgaatcgccagcggcatcagcaccttgtcgccttgcgtataatatttgcccatggtgaaaacgggggcgaagaagttgtccatattggccacgtttaaatcaaaactggtgaaactcacccagggattggctgagacgaaaaacatattctcaataaaccctttagggaaataggccaggttttcaccgtaacacgccacatcttgcgaatatatgtgtagaaactgccggaaatcgtcgtggtattcactccagagcgatgaaaacgtttcagtttgctcatggaaaacggtgtaacaagggtgaacactatcccatatcaccagctcaccgtctttcattgccatacgaaattccggatgagcattcatcaggcgggcaagaatgtgaataaaggccggataaaacttgtgcttatttttctttacggtctttaaaaaggccgtaatatccagctgaacggtctggttataggtacattgagcaactgactgaaatgcctcaaaatgttctttacgatgccattgggatatatcaacggtggtatatccagtgatttttttctccattttagcttccttagctcctgaaaatctcgataactcaaaaaatacgcccggtagtgatcttatttcattatggtgaaagttggaacctcttacgtgccgatcaacgtctcattttcgccagatatcgacgtctaagaaaccattattatcatgacattaacctataaaaataggcgtatcacgaggccctttcgtcttcacctcgagttgacagctagctcagtcctaggtataatgctagcgagcattaaagaggagaaaggtacctgcgtaaaggcgaagagctgttcactggtgtcgtccctattctggtggaactggatggtgatgtcaacggtcataagttttccgtgcgtggcgagggtgaaggtgacgcaactaatggtaaactgacgctgaagttcatctgtactactggtaaactgccggtaccttggccgactctggtaacgacgctgacttatggtgttcagtgctttgctcgttatccggaccatatgaagcagcatgacttcttcaagtccgccatgccggaaggctatgtgcaggaacgcacgatttcctttaaggatgacggcacgtacaaaacgcgtgcggaagtgaaatttgaaggcgataccctggtaaaccgcattgagctgaaaggcattgactttaaagaagacggcaatatcctgggccataagctggaatacaattttaacagccacaatgtttacatcaccgccgataaacaaaaaaatggcattaaagcgaattttaaaattcgccacaacgtggaggatggcagcgtgcagctggctgatcactaccagcaaaacactccaatcggtgatggtcctgttctgctgccagacaatcactatctgagcacgcaaagcgttctgtctaaagatccgaacgagaaacgcgatcatatggttctgctggagttcgtaa

SEQ ID NO: 117 - DNA, 35 bp, Artificial sequence
  synthetic
  promoter (1)..(35): J23119 promoter
ttgacagctagctcagtcctaggtataatgctagc

SEQ ID NO: 118 - DNA, 12 bp, Artificial sequence
  synthetic
  rbs (1)..(12): RBS
aaagaggagaaa

SEQ ID NO: 119 - DNA, 711 bp, Artificial sequence
  synthetic
  CDS (1)..(711): superfolder GFP
cgtaaaggcgaagagctgttcactggtgtcgtccctattctggtggaactggatggtgatgtcaacggtcataagttttccgtgcgtggcgagggtgaaggtgacgcaactaatggtaaactgacgctgaagttcatctgtactactggtaaactgccggtaccttggccgactctggtaacgacgctgacttatggtgttcagtgctttgctcgttatccggaccatatgaagcagcatgacttcttcaagtccgccatgccggaaggctatgtgcaggaacgcacgatttcctttaaggatgacggcacgtacaaaacgcgtgcggaagtgaaatttgaaggcgataccctggtaaaccgcattgagctgaaaggcattgactttaaagaagacggcaatatcctgggccataagctggaatacaattttaacagccacaatgtttacatcaccgccgataaacaaaaaaatggcattaaagcgaattttaaaattcgccacaacgtggaggatggcagcgtgcagctggctgatcactaccagcaaaacactccaatcggtgatggtcctgttctgctgccagacaatcactatctgagcacgcaaagcgttctgtctaaagatccgaacgagaaacgcgatcatatggttctgctggagttcgtaaccgcagcgggcatcacgcatggtatggatgaactgtacaaa

SEQ ID NO: 120 - protein, 237 aa, Artificial sequence
  Synthetic Construct
RKGEELFTGVVPILVELDGDVNGHKFSVRGEGEGDATNGKLTLKFICTTGKLPVPWPTLVTTLTYGVQCFARYPDHMKQHDFFKSAMPEGYVQERTISFKDDGTYKTRAEVKFEGDTLVNRIELKGIDFKEDGNILGHKLEYNFNSHNVYITADKQKNGIKANFKIRHNVEDGSVQLADHYQQNTPIGDGPVLLPDNHYLSTQSVLSKDPNEKRDHMVLLEFVTAAGITHGMDELYK

SEQ ID NO: 121 - DNA, 103 bp, Artificial sequence
  synthetic
  promoter (1)..(103): cat promoter
tgatcggcacgtaagaggttccaactttcaccataatgaaataagatcactaccgggcgtattttttgagttatcgagattttcaggagctaaggaagctaaa

SEQ ID NO: 122 - DNA, 6092 bp, Artificial sequence
  synthetic
  misc_feature (1)..(6092): pPL0017 plasmid
accaatgcttaatcagtgaggcacctatctcagcgatctgtctatttcgttcatccatagttgcctgactccccgtcgtgtagataactacgatacgggagggcttaccatctggccccagcgctgcgatgataccgcgagaaccacgctcaccggctccggatttatcagcaataaaccagccagccggaagggccgagcgcagaagtggtcctgcaactttatccgcctccatccagtctattaattgttgccgggaagctagagtaagtagttcgccagttaatagtttgcgcaacgttgttgccatcgctacaggcatcgtggtgtcacgctcgtcgtttggtatggcttcattcagctccggttcccaacgatcaaggcgagttacatgatcccccatgttgtgcaaaaaagcggttagctccttcggtcctccgatcgttgtcagaagtaagttggccgcagtgttatcactcatggttatggcagcactgcataattctcttactgtcatgccatccgtaagatgcttttctgtgactggtgagtactcaaccaagtcattctgagaatagtgtatgcggcgaccgagttgctcttgcccggcgtcaatacgggataataccgcgccacatagcagaactttaaaagtgctcatcattggaaaacgttcttcggggcgaaaactctcaaggatcttaccgctgttgagatccagttcgatgtaacccactcgtgcacccaactgatcttcagcatcttttactttcaccagcgtttctgggtgagcaaaaacaggaaggcaaaatgccgcaaaaaagggaataagggcgacacggaaatgttgaatactcatattcttcctttttcaatattattgaagcatttatcagggttattgtctcatgagcggatacatatttgaatgtatttagaaaaataaacaaataggggtcagtgttacaaccaattaaccaattctgaacattatcgcgagcccatttatacctgaatatggctcataacaccccttgtttgcctggcggcagtagcgcggtggtcccacctgaccccatgccgaactcagaagtgaaacgccgtagcgccgatggtagtgtggggactccccatgcgagagtagggaactgccaggcatcaaataaaacgaaaggctcagtcgaaagactgggcctttcgcccgggctaattatggggtgtcgcccttattcgactcacgtcgctcgatgtacgggccagatatacgcgttgacattgattattgactagttattaatagtaatcaattacggggtcattagttcatagcccatatatggagttccgcgttacataacttacggtaaatggcccgcctggctgaccgcccaacgacccccgcccattgacgtcaataatgacgtatgttcccatagtaacgccaatagggactttccattgacgtcaatgggtggagtatttacggtaaactgcccacttggcagtacatcaagtgtatcatatgccaagtacgccccctattgacgtcaatgacggtaaatggcccgcctggcattatgcccagtacatgaccttatgggactttcctacttggcagtacatctacgtattagtcatcgctattaccatggtgatgcggttttggcagtacatcaatgggcgtggatagcggtttgactcacggggatttccaagtctccaccccattgacgtcaatgggagtttgttttggcaccaaaatcaacgggactttccaaaatgtcgtaacaactccgccccattgacgcaaatgggcggtaggcgtgtacggtgggaggtctatataagcagagctctctggctaactagagaacccactgcttactggcttatcgaaatagtgcgatcgccaccatggtgagcaagggcgaggaggataacatggccatcatcaaggagttcatgcgcttcaaggtgcacatggagggctccgtgaacggccacgagttcgagatcgagggcgagggcgagggccgcccctacgagggcacccagaccgccaagctgaaggtgaccaagggtggccccctgcccttcgcctgggacatcctgtcccctcagttcatgtacggctccaaggcctacgtgaagcaccccgccgacatccccgactacttgaagctgtccttccccgagggcttcaagtgggagcgcgtgatgaacttcgaggacggcggcgtggtgaccgtgacccaggactcctccctgcaggacggcgagttcatctacaaggtgaagctgcgcggcaccaacttcccctccgacggccccgtaatgcagaagaagaccatgggctgggaggcctcctccgagcggatgtaccccgaggacggcgccctgaagggcgagatcaagcagaggctgaagctgaaggacggcggccactacgacgctgaggtcaagaccacctacaaggccaagaagcccgtgcagctgcccggcgcctacaacgtcaacatcaagttggacatcacctcccacaacgaggactacaccatcgtggaacagtacgaacgcgccgagggccgccactccaccggcggcatggacgagctgtacaagtagacacagtctctgtgccttctagttgccagccatctgttgtttgcccctcccccgtgccttccttgaccctggaaggtgccactcccactgtcctttcctaataaaatgaggaaattgcatcgcattgtctgagtaggtgtcattctattctggggggtggggtggggcaggacagcaagggggaggattgggaagacaatagcaggcatgctggggatgcggtgggctctatggacttgcgtccagcaggcagaagtatgcaaagcatgcatctcaattagtcagcaaccaggtgtggaaagtccccaggctccccagcaggcagaagtatgcaaagcatgcatctcaattagtcagcaaccatagtcccgcccctaactccgcccatcccgcccctaactccgcccagttccgcccattctccgccccatggctgactaattttttttatttatgcagaggccgaggccgcctctgcctctgagctattccagaagtagtgaggaggcttttttggaggcctaggcttttgcaaaaagctcccgggagcttgtatatccattttcggatctgatcagcacgtgatgaaaaagcctgaactcaccgcgacgtctgtcgagaagtttctgatcgaaaagttcgacagcgtctccgacctgatgcagctctcggagggcgaagaatctcgtgctttcagcttcgatgtaggagggcgtggatatgtcctgcgggtaaatagctgcgccgatggtttctacaaagatcgttatgtttatcggcactttgcatcggccgcgctcccgattccggaagtgcttgacattggggaattcagcgagagcctgacctattgcatctcccgccgtgcacagggtgtcacgttgcaagacctgcctgaaaccgaactgcccgctgttctgcagccggtcgcggaggccatggatgcgatcgctgcggccgatcttagccagacgagcgggttcggcccattcggaccgcaaggaatcggtcaatacactacatggcgtgatttcatatgcgcgattgctgatccccatgtgtatcactggcaaactgtgatggacgacaccgtcagtgcgtccgtcgcgcaggctctcgatgagctgatgctttgggccgaggactgccccgaagtccggcacctcgtgcacgcggatttcggctccaacaatgtcctgacggacaatggccgcataacagcggtcattgactggagcgaggcgatgttcggggattcccaatacgaggtcgccaacatcttcttctggaggccgtggttggcttgtatggagcagcagacgcgctacttcgagcggaggcatccggagcttgcaggatcgccgcggctccgggcgtatatgctccgcattggtcttgaccaactctatcagagcttggttgacggcaatttcgatgatgcagcttgggcgcagggtcgatgcgacgcaatcgtccgatccggagccgggactgtcgggcgtacacaaatcgcccgcagaagcgcggccgtctggaccgatggctgtgtagaagtactcgccgatagtggaaaccgacgccccagcactcgtccgagggcaaaggaatagcacgtgctacgagatttcgattccaccgccgccttctatgaaaggttgggcttcggaatcgttttccgggacgccggctggatgatcctccagcgcggggatctcatgctggagttcttcgcccaccccaacttgtttattgcagcttataatggttacaaataaagcaatagcatcacaaatttcacaaataaagcatttttttcactgcattctagttgtggtttgtccaaactcatcaatgtatcttatcatgtctgtataccgtcgacctctagctagagcttggcgtaatcatggtcatagctgtttcctgtgtgaaattgttatccgctcacaattccacacaacatacgagccggaagcataaagtgtaaagcctgattaagctagtgagtcgaataagggcgacacaaaatttattctaaatgcataataaatactgataacatcttatagtttgtattatattttgtattatcgttgacatgtataattttgatatcaaaaactgattttccctttattattttcgagatttattttcttaattctctttaacaaactagaaatattgtatatacaaaaaatcataaataatagatgaatagtttaattataggtgttcatcaatcgaaaaagcaacgtatcttatttaaagtgcgttgcttttttctcatttataaggttaaataattctcatatatcaagcaaagtgacaggcgcccttaaatattctgacaaatgctctttccctaaactccccccataaaaaaacccgccgaagcgggtttttacgttatttgcggattaacgattactcgttatcagaaccgcccagggggcccgagcttaagactggccgtcgttttacaacacagaaagagtttgtagaaacgcaaaaaggccatccgtcaggggccttctgcttagtttgatgcctggcagttccctactctcgccttccgcttcctcgctcactgactcgctgcgctcggtcgttcggctgcggcgagcggtatcagctcactcaaaggcggtaatacggttatccacagaatcaggggataacgcaggaaagaacatgtgagcaaaaggccagcaaaaggccaggaaccgtaaaaaggccgcgttgctggcgtttttccataggctccgcccccctgacgagcatcacaaaaatcgacgctcaagtcagaggtggcgaaacccgacaggactataaagataccaggcgtttccccctggaagctccctcgtgcgctctcctgttccgaccctgccgcttaccggatacctgtccgcctttctcccttcgggaagcgtggcgctttctcatagctcacgctgtaggtatctcagttcggtgtaggtcgttcgctccaagctgggctgtgtgcacgaaccccccgttcagcccgaccgctgcgccttatccggtaactatcgtcttgagtccaacccggtaagacacgacttatcgccactggcagcagccactggtaacaggattagcagagcgaggtatgtaggcggtgctacagagttcttgaagtggtgggctaactacggctacactagaagaacagtatttggtatctgcgctctgctgaagccagttaccttcggaaaaagagttggtagctcttgatccggcaaacaaaccaccgctggtagcggtggtttttttgtttgcaagcagcagattacgcgcagaaaaaaaggatctcaagaagatcctttgatcttttctacggggtctgacgctcagtggaacgacgcgcgcgtaactcacgttaagggattttggtcatgagcttgcgccgtcccgtcaagtcagcgtaatgctctgctttt

SEQ ID NO: 123 - DNA, 380 bp, Artificial sequence
  synthetic
  enhancer (1)..(380): CMV enhancer
gacattgattattgactagttattaatagtaatcaattacggggtcattagttcatagcccatatatggagttccgcgttacataacttacggtaaatggcccgcctggctgaccgcccaacgacccccgcccattgacgtcaataatgacgtatgttcccatagtaacgccaatagggactttccattgacgtcaatgggtggagtatttacggtaaactgcccacttggcagtacatcaagtgtatcatatgccaagtacgccccctattgacgtcaatgacggtaaatggcccgcctggcattatgcccagtacatgaccttatgggactttcctacttggcagtacatctacgtattagtcatcgctattaccatg

SEQ ID NO: 124 - DNA, 204 bp, Artificial sequence
  synthetic
  promoter (1)..(204): CMV promoter
gtgatgcggttttggcagtacatcaatgggcgtggatagcggtttgactcacggggatttccaagtctccaccccattgacgtcaatgggagtttgttttggcaccaaaatcaacgggactttccaaaatgtcgtaacaactccgccccattgacgcaaatgggcggtaggcgtgtacggtgggaggtctatataagcagagct

SEQ ID NO: 125 - DNA, 711 bp, Artificial sequence
  synthetic
  CDS (1)..(711): monomeric red fluorescent protein gene (mCherry)
atggtgagcaagggcgaggaggataacatggccatcatcaaggagttcatgcgcttcaaggtgcacatggagggctccgtgaacggccacgagttcgagatcgagggcgagggcgagggccgcccctacgagggcacccagaccgccaagctgaaggtgaccaagggtggccccctgcccttcgcctgggacatcctgtcccctcagttcatgtacggctccaaggcctacgtgaagcaccccgccgacatccccgactacttgaagctgtccttccccgagggcttcaagtgggagcgcgtgatgaacttcgaggacggcggcgtggtgaccgtgacccaggactcctccctgcaggacggcgagttcatctacaaggtgaagctgcgcggcaccaacttcccctccgacggccccgtaatgcagaagaagaccatgggctgggaggcctcctccgagcggatgtaccccgaggacggcgccctgaagggcgagatcaagcagaggctgaagctgaaggacggcggccactacgacgctgaggtcaagaccacctacaaggccaagaagcccgtgcagctgcccggcgcctacaacgtcaacatcaagttggacatcacctcccacaacgaggactacaccatcgtggaacagtacgaacgcgccgagggccgccactccaccggcggcatggacgagctgtacaagtag

SEQ ID NO: 126 - protein, 236 aa, Artificial sequence
  Synthetic Construct
MVSKGEEDNMAIIKEFMRFKVHMEGSVNGHEFEIEGEGEGRPYEGTQTAKLKVTKGGPLPFAWDILSPQFMYGSKAYVKHPADIPDYLKLSFPEGFKWERVMNFEDGGVVTVTQDSSLQDGEFIYKVKLRGTNFPSDGPVMQKKTMGWEASSERMYPEDGALKGEIKQRLKLKDGGHYDAEVKTTYKAKKPVQLPGAYNVNIKLDITSHNEDYTIVEQYERAEGRHSTGGMDELYK

SEQ ID NO: 127 - DNA, 225 bp, Artificial sequence
  synthetic
  polyA_signal (1)..(225)
ctgtgccttctagttgccagccatctgttgtttgcccctcccccgtgccttccttgaccctggaaggtgccactcccactgtcctttcctaataaaatgaggaaattgcatcgcattgtctgagtaggtgtcattctattctggggggtggggtggggcaggacagcaagggggaggattgggaagacaatagcaggcatgctggggatgcggtgggctctatgg

SEQ ID NO: 128 - DNA, 211 bp, Artificial sequence
  synthetic
  promoter (1)..(211): SV promoter
gcaggcagaagtatgcaaagcatgcatctcaattagtcagcaaccatagtcccgcccctaactccgcccatcccgcccctaactccgcccagttccgcccattctccgccccatggctgactaattttttttatttatgcagaggccgaggccgcctctgcctctgagctattccagaagtagtgaggaggcttttttggaggcctaggct

SEQ ID NO: 129 - DNA, 1026 bp, Artificial sequence
  synthetic
  CDS (1)..(1026): hygR encoding hygromycin resistance
atgaaaaagcctgaactcaccgcgacgtctgtcgagaagtttctgatcgaaaagttcgacagcgtctccgacctgatgcagctctcggagggcgaagaatctcgtgctttcagcttcgatgtaggagggcgtggatatgtcctgcgggtaaatagctgcgccgatggtttctacaaagatcgttatgtttatcggcactttgcatcggccgcgctcccgattccggaagtgcttgacattggggaattcagcgagagcctgacctattgcatctcccgccgtgcacagggtgtcacgttgcaagacctgcctgaaaccgaactgcccgctgttctgcagccggtcgcggaggccatggatgcgatcgctgcggccgatcttagccagacgagcgggttcggcccattcggaccgcaaggaatcggtcaatacactacatggcgtgatttcatatgcgcgattgctgatccccatgtgtatcactggcaaactgtgatggacgacaccgtcagtgcgtccgtcgcgcaggctctcgatgagctgatgctttgggccgaggactgccccgaagtccggcacctcgtgcacgcggatttcggctccaacaatgtcctgacggacaatggccgcataacagcggtcattgactggagcgaggcgatgttcggggattcccaatacgaggtcgccaacatcttcttctggaggccgtggttggcttgtatggagcagcagacgcgctacttcgagcggaggcatccggagcttgcaggatcgccgcggctccgggcgtatatgctccgcattggtcttgaccaactctatcagagcttggttgacggcaatttcgatgatgcagcttgggcgcagggtcgatgcgacgcaatcgtccgatccggagccgggactgtcgggcgtacacaaatcgcccgcagaagcgcggccgtctggaccgatggctgtgtagaagtactcgccgatagtggaaaccgacgccccagcactcgtccgagggcaaaggaatag

SEQ ID NO: 130 - protein, 341 aa, Artificial sequence
  Synthetic Construct
MKKPELTATSVEKFLIEKFDSVSDLMQLSEGEESRAFSFDVGGRGYVLRVNSCADGFYKDRYVYRHFASAALPIPEVLDIGEFSESLTYCISRRAQGVTLQDLPETELPAVLQPVAEAMDAIAAADLSQTSGFGPFGPQGIGQYTTWRDFICAIADPHVYHWQTVMDDTVSASVAQALDELMLWAEDCPEVRHLVHADFGSNNVLTDNGRITAVIDWSEAMFGDSQYEVANIFFWRPWLACMEQQTRYFERRHPELAGSPRLRAYMLRIGLDQLYQSLVDGNFDDAAWAQGRCDAIVRSGAGTVGRTQIARRSAAVWTDGCVEVLADSGNRRPSTRPRAKE

SEQ ID NO: 131 - DNA, 122 bp, Artificial sequence
  synthetic
  rep_origin (1)..(122): SV40 poly(A) signal
aacttgtttattgcagcttataatggttacaaataaagcaatagcatcacaaatttcacaaataaagcatttttttcactgcattctagttgtggtttgtccaaactcatcaatgtatctta

SEQ ID NO: 132 - DNA, 4730 bp, Artificial sequence
  synthetic
  misc_feature (1)..(4730): pAcGFP1-N2 plasmid
tagttattaatagtaatcaattacggggtcattagttcatagcccatatatggagttccgcgttacataacttacggtaaatggcccgcctggctgaccgcccaacgacccccgcccattgacgtcaataatgacgtatgttcccatagtaacgccaatagggactttccattgacgtcaatgggtggagtatttacggtaaactgcccacttggcagtacatcaagtgtatcatatgccaagtacgccccctattgacgtcaatgacggtaaatggcccgcctggcattatgcccagtacatgaccttatgggactttcctacttggcagtacatctacgtattagtcatcgctattaccatggtgatgcggttttggcagtacatcaatgggcgtggatagcggtttgactcacggggatttccaagtctccaccccattgacgtcaatgggagtttgttttggcaccaaaatcaacgggactttccaaaatgtcgtaacaactccgccccattgacgcaaatgggcggtaggcgtgtacggtgggaggtctatataagcagagctggtttagtgaaccgtcagatccgctagcgctaccggactcagatctcgagctcaagcttcgaattctgcagtcgacggtaccgcgggcccgggatccaccggccggtcatggtgagcaagggcgccgagctgttcaccggcatcgtgcccatcctgatcgagctgaatggcgatgtgaatggccacaagttcagcgtgagcggcgagggcgagggcgatgccacctacggcaagctgaccctgaagttcatctgcaccaccggcaagctgcctgtgccctggcccaccctggtgaccaccctgagctacggcgtgcagtgcttctcacgctaccccgatcacatgaagcagcacgacttcttcaagagcgccatgcctgagggctacatccaggagcgcaccatcttcttcgaggatgacggcaactacaagtcgcgcgccgaggtgaagttcgagggcgataccctggtgaatcgcatcgagctgaccggcaccgatttcaaggaggatggcaacatcctgggcaataagatggagtacaactacaacgcccacaatgtgtacatcatgaccgacaaggccaagaatggcatcaaggtgaacttcaagatccgccacaacatcgaggatggcagcgtgcagctggccgaccactaccagcagaatacccccatcggcgatggccctgtgctgctgcccgataaccactacctgtccacccagagcgccctgtccaaggaccccaacgagaagcgcgatcacatgatctacttcggcttcgtgaccgccgccgccatcacccacggcatggatgagctgtacaagtgagcggccgcgactctagatcataatcagccataccacatttgtagaggttttacttgctttaaaaaacctcccacacctccccctgaacctgaaacataaaatgaatgcaattgttgttgttaacttgtttattgcagcttataatggttacaaataaagcaatagcatcacaaatttcacaaataaagcatttttttcactgcattctagttgtggtttgtccaaactcatcaatgtatcttaaggcgtaaattgtaagcgttaatattttgttaaaattcgcgttaaatttttgttaaatcagctcattttttaaccaataggccgaaatcggcaaaatcccttataaatcaaaagaatagaccgagatagggttgagtgttgttccagtttggaacaagagtccactattaaagaacgtggactccaacgtcaaagggcgaaaaaccgtctatcagggcgatggcccactacgtgaaccatcaccctaatcaagttttttggggtcgaggtgccgtaaagcactaaatcggaaccctaaagggagcccccgatttagagcttgacggggaaagccggcgaacgtggcgagaaaggaagggaagaaagcgaaaggagcgggcgctagggcgctggcaagtgtagcggtcacgctgcgcgtaaccaccacacccgccgcgcttaatgcgccgctacagggcgcgtcaggtggcacttttcggggaaatgtgcgcggaacccctatttgtttatttttctaaatacattcaaatatgtatccgctcatgagacaataaccctgataaatgcttcaataatattgaaaaaggaagagtcctgaggcggaaagaaccagctgtggaatgtgtgtcagttagggtgtggaaagtccccaggctccccagcaggcagaagtatgcaaagcatgcatctcaattagtcagcaaccaggtgtggaaagtccccaggctccccagcaggcagaagtatgcaaagcatgcatctcaattagtcagcaaccatagtcccgcccctaactccgcccatcccgcccctaactccgcccagttccgcccattctccgccccatggctgactaattttttttatttatgcagaggccgaggccgcctcggcctctgagctattccagaagtagtgaggaggcttttttggaggcctaggcttttgcaaagatcgatcaagagacaggatgaggatcgtttcgcatgattgaacaagatggattgcacgcaggttctccggccgcttgggtggagaggctattcggctatgactgggcacaacagacaatcggctgctctgatgccgccgtgttccggctgtcagcgcaggggcgcccggttctttttgtcaagaccgacctgtccggtgccctgaatgaactgcaagacgaggcagcgcggctatcgtggctggccacgacgggcgttccttgcgcagctgtgctcgacgttgtcactgaagcgggaagggactggctgctattgggcgaagtgccggggcaggatctcctgtcatctcaccttgctcctgccgagaaagtatccatcatggctgatgcaatgcggcggctgcatacgcttgatccggctacctgcccattcgaccaccaagcgaaacatcgcatcgagcgagcacgtactcggatggaagccggtcttgtcgatcaggatgatctggacgaagagcatcaggggctcgcgccagccgaactgttcgccaggctcaaggcgagcatgcccgacggcgaggatctcgtcgtgacccatggcgatgcctgcttgccgaatatcatggtggaaaatggccgcttttctggattcatcgactgtggccggctgggtgtggcggaccgctatcaggacatagcgttggctacccgtgatattgctgaagagcttggcggcgaatgggctgaccgcttcctcgtgctttacggtatcgccgctcccgattcgcagcgcatcgccttctatcgccttcttgacgagttcttctgagcgggactctggggttcgaaatgaccgaccaagcgacgcccaacctgccatcacgagatttcgattccaccgccgccttctatgaaaggttgggcttcggaatcgttttccgggacgccggctggatgatcctccagcgcggggatctcatgctggagttcttcgcccaccctagggggaggctaactgaaacacggaaggagacaataccggaaggaacccgcgctatgacggcaataaaaagacagaataaaacgcacggtgttgggtcgtttgttcataaacgcggggttcggtcccagggctggcactctgtcgataccccaccgagaccccattggggccaatacgcccgcgtttcttccttttccccaccccaccccccaagttcgggtgaaggcccagggctcgcagccaacgtcggggcggcaggccctgccatagcctcaggttactcatatatactttagattgatttaaaacttcatttttaatttaaaaggatctaggtgaagatcctttttgataatctcatgaccaaaatcccttaacgtgagttttcgttccactgagcgtcagaccccgtagaaaagatcaaaggatcttcttgagatcctttttttctgcgcgtaatctgctgcttgcaaacaaaaaaaccaccgctaccagcggtggtttgtttgccggatcaagagctaccaactctttttccgaaggtaactggcttcagcagagcgcagataccaaatactgttcttctagtgtagccgtagttaggccaccacttcaagaactctgtagcaccgcctacatacctcgctctgctaatcctgttaccagtggctgctgccagtggcgataagtcgtgtcttaccgggttggactcaagacgatagttaccggataaggcgcagcggtcgggctgaacggggggttcgtgcacacagcccagcttggagcgaacgacctacaccgaactgagatacctacagcgtgagctatgagaaagcgccacgcttcccgaagggagaaaggcggacaggtatccggtaagcggcagggtcggaacaggagagcgcacgagggagcttccagggggaaacgcctggtatctttatagtcctgtcgggtttcgccacctctgacttgagcgtcgatttttgtgatgctcgtcaggggggcggagcctatggaaaaacgccagcaacgcggcctttttacggttcctggccttttgctggccttttgctcacatgttctttcctgcgttatcccctgattctgtggataaccgtattaccgccatgcat

SEQ ID NO: 133 - DNA, 589 bp, Artificial sequence
  synthetic
  promoter (1)..(589): CMV IE Promoter
tagttattaatagtaatcaattacggggtcattagttcatagcccatatatggagttccgcgttacataacttacggtaaatggcccgcctggctgaccgcccaacgacccccgcccattgacgtcaataatgacgtatgttcccatagtaacgccaatagggactttccattgacgtcaatgggtggagtatttacggtaaactgcccacttggcagtacatcaagtgtatcatatgccaagtacgccccctattgacgtcaatgacggtaaatggcccgcctggcattatgcccagtacatgaccttatgggactttcctacttggcagtacatctacgtattagtcatcgctattaccatggtgatgcggttttggcagtacatcaatgggcgtggatagcggtttgactcacggggatttccaagtctccaccccattgacgtcaatgggagtttgttttggcaccaaaatcaacgggactttccaaaatgtcgtaacaactccgccccattgacgcaaatgggcggtaggcgtgtacggtgggaggtctatataagcagagctggtttagtgaaccgtcagatc

SEQ ID NO: 134 - DNA, 717 bp, Aequorea coerulescens
  CDS (1)..(717): Aequorea coerulescens GFP gene
atggtgagcaagggcgccgagctgttcaccggcatcgtgcccatcctgatcgagctgaatggcgatgtgaatggccacaagttcagcgtgagcggcgagggcgagggcgatgccacctacggcaagctgaccctgaagttcatctgcaccaccggcaagctgcctgtgccctggcccaccctggtgaccaccctgagctacggcgtgcagtgcttctcacgctaccccgatcacatgaagcagcacgacttcttcaagagcgccatgcctgagggctacatccaggagcgcaccatcttcttcgaggatgacggcaactacaagtcgcgcgccgaggtgaagttcgagggcgataccctggtgaatcgcatcgagctgaccggcaccgatttcaaggaggatggcaacatcctgggcaataagatggagtacaactacaacgcccacaatgtgtacatcatgaccgacaaggccaagaatggcatcaaggtgaacttcaagatccgccacaacatcgaggatggcagcgtgcagctggccgaccactaccagcagaatacccccatcggcgatggccctgtgctgctgcccgataaccactacctgtccacccagagcgccctgtccaaggaccccaacgagaagcgcgatcacatgatctacttcggcttcgtgaccgccgccgccatcacccacggcatggatgagctgtacaag

SEQ ID NO: 135 - protein, 239 aa, Aequorea coerulescens
MVSKGAELFTGIVPILIELNGDVNGHKFSVSGEGEGDATYGKLTLKFICTTGKLPVPWPTLVTTLSYGVQCFSRYPDHMKQHDFFKSAMPEGYIQERTIFFEDDGNYKSRAEVKFEGDTLVNRIELTGTDFKEDGNILGNKMEYNYNAHNVYIMTDKAKNGIKVNFKIRHNIEDGSVQLADHYQQNTPIGDGPVLLPDNHYLSTQSALSKDPNEKRDHMIYFGFVTAAAITHGMDELYK

SEQ ID NO: 136 - DNA, 35 bp, Artificial sequence
  synthetic
  polyA_signal (1)..(35): SV40 early polyA signal
ataaagcaatagcatcacaaatttcacaaataaag

SEQ ID NO: 137 - DNA, 456 bp, Artificial sequence
  synthetic
  rep_origin (1)..(456): f1 origin
aattgtaagcgttaatattttgttaaaattcgcgttaaatttttgttaaatcagctcattttttaaccaataggccgaaatcggcaaaatcccttataaatcaaaagaatagaccgagatagggttgagtgttgttccagtttggaacaagagtccactattaaagaacgtggactccaacgtcaaagggcgaaaaaccgtctatcagggcgatggcccactacgtgaaccatcaccctaatcaagttttttggggtcgaggtgccgtaaagcactaaatcggaaccctaaagggagcccccgatttagagcttgacggggaaagccggcgaacgtggcgagaaaggaagggaagaaagcgaaaggagcgggcgctagggcgctggcaagtgtagcggtcacgctgcgcgtaaccaccacacccgccgcgcttaatgcgccgctacagggcgcgtc

SEQ ID NO: 138 - DNA, 29 bp, Artificial sequence
  synthetic
  promoter (1)..(29): Bacterial Promoter for Kan(R)
ttcaaatatgtatccgctcatgagacaat

SEQ ID NO: 139 - DNA, 230 bp, Artificial sequence
  synthetic
  promoter (1)..(230): SV40 early Promoter/Enhancer
ggtgtggaaagtccccaggctccccagcaggcagaagtatgcaaagcatgcatctcaattagtcagcaaccaggtgtggaaagtccccaggctccccagcaggcagaagtatgcaaagcatgcatctcaattagtcagcaaccatagtcccgcccctaactccgcccatcccgcccctaactccgcccagttccgcccattctccgccccatggctgactaatttttttt

SEQ ID NO: 140 - DNA, 792 bp, Artificial sequence
  synthetic
  CDS (1)..(792): Kan(R)/Neo(R)
atgattgaacaagatggattgcacgcaggttctccggccgcttgggtggagaggctattcggctatgactgggcacaacagacaatcggctgctctgatgccgccgtgttccggctgtcagcgcaggggcgcccggttctttttgtcaagaccgacctgtccggtgccctgaatgaactgcaagacgaggcagcgcggctatcgtggctggccacgacgggcgttccttgcgcagctgtgctcgacgttgtcactgaagcgggaagggactggctgctattgggcgaagtgccggggcaggatctcctgtcatctcaccttgctcctgccgagaaagtatccatcatggctgatgcaatgcggcggctgcatacgcttgatccggctacctgcccattcgaccaccaagcgaaacatcgcatcgagcgagcacgtactcggatggaagccggtcttgtcgatcaggatgatctggacgaagagcatcaggggctcgcgccagccgaactgttcgccaggctcaaggcgagcatgcccgacggcgaggatctcgtcgtgacccatggcgatgcctgcttgccgaatatcatggtggaaaatggccgcttttctggattcatcgactgtggccggctgggtgtggcggaccgctatcaggacatagcgttggctacccgtgatattgctgaagagcttggcggcgaatgggctgaccgcttcctcgtgctttacggtatcgccgctcccgattcgcagcgcatcgccttctatcgccttcttgacgagttcttc

SEQ ID NO: 141 - protein, 264 aa, Artificial sequence
  Synthetic Construct
MIEQDGLHAGSPAAWVERLFGYDWAQQTIGCSDAAVFRLSAQGRPVLFVKTDLSGALNELQDEAARLSWLATTGVPCAAVLDVVTEAGRDWLLLGEVPGQDLLSSHLAPAEKVSIMADAMRRLHTLDPATCPFDHQAKHRIERARTRMEAGLVDQDDLDEEHQGLAPAELFARLKASMPDGEDLVVTHGDACLPNIMVENGRFSGFIDCGRLGVADRYQDIALATRDIAEELGGEWADRFLVLYGIAAPDSQRIAFYRLLDEFF

SEQ ID NO: 142 - DNA, 19 bp, Artificial sequence
  synthetic
  polyA_signal (1)..(19): HSV TK polyA signal
aataaaaagacagaataaa

SEQ ID NO: 143 - DNA, 644 bp, Artificial sequence
  synthetic
  rep_origin (1)..(644): pUC origin
gtagaaaagatcaaaggatcttcttgagatcctttttttctgcgcgtaatctgctgcttgcaaacaaaaaaaccaccgctaccagcggtggtttgtttgccggatcaagagctaccaactctttttccgaaggtaactggcttcagcagagcgcagataccaaatactgttcttctagtgtagccgtagttaggccaccacttcaagaactctgtagcaccgcctacatacctcgctctgctaatcctgttaccagtggctgctgccagtggcgataagtcgtgtcttaccgggttggactcaagacgatagttaccggataaggcgcagcggtcgggctgaacggggggttcgtgcacacagcccagcttggagcgaacgacctacaccgaactgagatacctacagcgtgagctatgagaaagcgccacgcttcccgaagggagaaaggcggacaggtatccggtaagcggcagggtcggaacaggagagcgcacgagggagcttccagggggaaacgcctggtatctttatagtcctgtcgggtttcgccacctctgacttgagcgtcgatttttgtgatgctcgtcaggggggcggagcctatggaaaaacgccagcaacgcggcctttttacggttcct

SEQ ID NO: 144 - DNA, 3160 bp, Artificial sequence
  synthetic
  misc_feature (1)..(3160): pUC57-sfGFP11x7-CmR plasmid
ccaatgatcggccgcggcaattgacggctagctcagtcctaggtacagtgctagcccccataaccgtcgcatatagaggattttatgcgtgaccacatggtccttcatgagtatgtaaatgctgctgggattacaggtggctctggaggtagagatcatatggttctccacgaatacgttaacgccgcaggcatcactggcggtagtggaggacgcgaccatatggtactacatgaatatgtcaatgcagccggaataaccggagggtccggaggccgggatcacatggtgctgcatgagtatgtgaacgcggcgggtataactggtgggtcgggcggacgagaccatatggtgcttcacgaatacgtaaacgcagctggcattactggcggatcaggtggcagggatcacatggtactccatgagtacgtgaacgctgctggaatcacaggcggtagcggcggtcgggaccatatggtcctgcacgaatatgtcaatgctgccggtatcacctgacataggaggtcctcctatgtcagagaaaaaaatcactggatataccaccgttgatatatcccaatggcatcgtaaagaacattttgaggcatttcagtcagttgctcaatgtacctataaccagaccgttcagctggatattacggcctttttaaagaccgtaaagaaaaataagcacaagttttatccggcctttattcacattcttgcccgcctgatgaatgctcatccggaattccgtatggcaatgaaagacggtgagctggtgatatgggatagtgttcacccttgttacaccgttttccatgagcaaactgaaacgttttcatcgctctggagtgaataccacgacgatttccggcagtttctacacatatattcgcaagatgtggcgtgttacggtgaaaacctggcctatttccctaaagggtttattgagaatatgtttttcgtctcagccaatccctgggtgagtttcaccagttttgatttaaacgtggccaatatggacaacttcttcgcccccgttttcaccatgggcaaatattatacgcaaggcgacaaggtgctgatgccgctggcgattcaggttcatcatgccgtttgtgatggcttccatgtcggcagaatgcttaatgaattacaacagtactgcgatgagtggcaggcggggcgtaatctagaggatccggcttactaaggcggccgcggcaaattccaaataaaacgaaaggctcagtcgaaagactgggcctttcgttttatctgttgtttgtcggtgaacgctctcctgagtaggacaaatggcggcaaattcatcggaaagaacatgtgagcaaaaggccagcaaaaggccaggaaccgtaaaaaggccgcgttgctggcgtttttccataggctccgcccccctgacgagcatcacaaaaatcgacgctcaagtcagaggtggcgaaacccgacaggactataaagataccaggcgtttccccctggaagctccctcgtgcgctctcctgttccgaccctgccgcttaccggatacctgtccgcctttctcccttcgggaagcgtggcgctttctcatagctcacgctgtaggtatctcagttcggtgtaggtcgttcgctccaagctgggctgtgtgcacgaaccccccgttcagcccgaccgctgcgccttatccggtaactatcgtcttgagtccaacccggtaagacacgacttatcgccactggcagcagccactggtaacaggattagcagagcgaggtatgtaggcggtgctacagagttcttgaagtggtggcctaactacggctacactagaagaacagtatttggtatctgcgctctgctgaagccagttaccttcggaaaaagagttggtagctcttgatccggcaaacaaaccaccgctggtagcggtggtttttttgtttgcaagcagcagattacgcgcagaaaaaaaggatctcaagaagatcctttgatcttttctacggggtctgacgctcagtggaacgaaaactcacgttaagggattttggtcatgagattatcaaaaaggatcttcacctagatccttttaaattaaaaatgaagttttaaatcaatctaaagtatatatgagtaaacttggtctgacagttaccaatgcttaatcagtgaggcacctatctcagcgatctgtctatttcgttcatccatagttgcctgactccccgtcgtgtagataactacgatacgggagggcttaccatctggccccagtgctgcaatgataccgcgagacccacgctcaccggctccagatttatcagcaataaaccagccagccggaagggccgagcgcagaagtggtcctgcaactttatccgcctccatccagtctattaattgttgccgggaagctagagtaagtagttcgccagttaatagtttgcgcaacgttgttgccattgctacaggcatcgtggtgtcacgctcgtcgtttggtatggcttcattcagctccggttcccaacgatcaaggcgagttacatgatcccccatgttgtgcaaaaaagcggttagctccttcggtcctccgatcgttgtcagaagtaagttggccgcagtgttatcactcatggttatggcagcactgcataattctcttactgtcatgccatccgtaagatgcttttctgtgactggtgagtactcaaccaagtcattctgagaatagtgtatgcggcgaccgagttgctcttgcccggcgtcaatacgggataataccgcgccacatagcagaactttaaaagtgctcatcattggaaaacgttcttcggggcgaaaactctcaaggatcttaccgctgttgagatccagttcgatgtaacccactcgtgcacccaactgatcttcagcatcttttactttcaccagcgtttctgggtgagcaaaaacaggaaggcaaaatgccgcaaaaaagggaataagggcgacacggaaatgttgaatactcatactcttcctttttcaatattattgaagcatttatcagggttattgtctcatgagcggatacatatttgaatgtatttagaaaaataaacaaataggggttccgcgcacatttccccgaaaagtgccacctgacgtc

SEQ ID NO: 145 - DNA, 35 bp, Artificial sequence
  synthetic
  promoter (1)..(35): BBa_J23100 promoter
ttgacggctagctcagtcctaggtacagtgctagc

SEQ ID NO: 146 - DNA, 29 bp, Artificial sequence
  synthetic
  RBS (1)..(29): RBS (98.3 au)
ccccataaccgtcgcatatagaggatttt

SEQ ID NO: 147 - DNA, 429 bp, Artificial sequence
  synthetic
  CDS (1)..(429): gene encoding GFP with 7 tandem repeats of the 11th barrel
atgcgtgaccacatggtccttcatgagtatgtaaatgctgctgggattacaggtggctctggaggtagagatcatatggttctccacgaatacgttaacgccgcaggcatcactggcggtagtggaggacgcgaccatatggtactacatgaatatgtcaatgcagccggaataaccggagggtccggaggccgggatcacatggtgctgcatgagtatgtgaacgcggcgggtataactggtgggtcgggcggacgagaccatatggtgcttcacgaatacgtaaacgcagctggcattactggcggatcaggtggcagggatcacatggtactccatgagtacgtgaacgctgctggaatcacaggcggtagcggcggtcgggaccatatggtcctgcacgaatatgtcaatgctgccggtatcacc

SEQ ID NO: 148 - protein, 143 aa, Artificial sequence
  Synthetic Construct
MRDHMVLHEYVNAAGITGGSGGRDHMVLHEYVNAAGITGGSGGRDHMVLHEYVNAAGITGGSGGRDHMVLHEYVNAAGITGGSGGRDHMVLHEYVNAAGITGGSGGRDHMVLHEYVNAAGITGGSGGRDHMVLHEYVNAAGIT

SEQ ID NO: 149 - DNA, 16 bp, Artificial sequence
  synthetic
  misc_feature (1)..(16): Translational coupling device
cataggaggtcctcct

SEQ ID NO: 150 - DNA, 2995 bp, Artificial sequence
  synthetic
  misc_feature (1)..(2995): pUC57-sfCherry11x4-CmR plasmid
ccaatgatcggccgcggcaattgacggctagctcagtcctaggtacagtgctagcccccataaccgtcgcatatagaggattttatgtacacaatcgttgaacagtacgagagggcagagggtaggcatagcacaggtggagggggcagtggcggctacaccatcgtcgagcaatatgagagagctgaaggccgccactctacaggtggaggaggttctggtgggtataccatcgttgaacagtacgaacgcgctgagggcaggcactccacaggaggtggtggtagtggggggtataccatcgtcgagcagtacgagcgcgccgagggcaggcacagtaccggtggttgacataggaggtcctcctatgtcagagaaaaaaatcactggatataccaccgttgatatatcccaatggcatcgtaaagaacattttgaggcatttcagtcagttgctcaatgtacctataaccagaccgttcagctggatattacggcctttttaaagaccgtaaagaaaaataagcacaagttttatccggcctttattcacattcttgcccgcctgatgaatgctcatccggaattccgtatggcaatgaaagacggtgagctggtgatatgggatagtgttcacccttgttacaccgttttccatgagcaaactgaaacgttttcatcgctctggagtgaataccacgacgatttccggcagtttctacacatatattcgcaagatgtggcgtgttacggtgaaaacctggcctatttccctaaagggtttattgagaatatgtttttcgtctcagccaatccctgggtgagtttcaccagttttgatttaaacgtggccaatatggacaacttcttcgcccccgttttcaccatgggcaaatattatacgcaaggcgacaaggtgctgatgccgctggcgattcaggttcatcatgccgtttgtgatggcttccatgtcggcagaatgcttaatgaattacaacagtactgcgatgagtggcaggcggggcgtaatctagaggatccggcttactaaggcggccgcggcaaattccaaataaaacgaaaggctcagtcgaaagactgggcctttcgttttatctgttgtttgtcggtgaacgctctcctgagtaggacaaatggcggcaaattcatcggaaagaacatgtgagcaaaaggccagcaaaaggccaggaaccgtaaaaaggccgcgttgctggcgtttttccataggctccgcccccctgacgagcatcacaaaaatcgacgctcaagtcagaggtggcgaaacccgacaggactataaagataccaggcgtttccccctggaagctccctcgtgcgctctcctgttccgaccctgccgcttaccggatacctgtccgcctttctcccttcgggaagcgtggcgctttctcatagctcacgctgtaggtatctcagttcggtgtaggtcgttcgctccaagctgggctgtgtgcacgaaccccccgttcagcccgaccgctgcgccttatccggtaactatcgtcttgagtccaacccggtaagacacgacttatcgccactggcagcagccactggtaacaggattagcagagcgaggtatgtaggcggtgctacagagttcttgaagtggtggcctaactacggctacactagaagaacagtatttggtatctgcgctctgctgaagccagttaccttcggaaaaagagttggtagctcttgatccggcaaacaaaccaccgctggtagcggtggtttttttgtttgcaagcagcagattacgcgcagaaaaaaaggatctcaagaagatcctttgatcttttctacggggtctgacgctcagtggaacgaaaactcacgttaagggattttggtcatgagattatcaaaaaggatcttcacctagatccttttaaattaaaaatgaagttttaaatcaatctaaagtatatatgagtaaacttggtctgacagttaccaatgcttaatcagtgaggcacctatctcagcgatctgtctatttcgttcatccatagttgcctgactccccgtcgtgtagataactacgatacgggagggcttaccatctggccccagtgctgcaatgataccgcgagacccacgctcaccggctccagatttatcagcaataaaccagccagccggaagggccgagcgcagaagtggtcctgcaactttatccgcctccatccagtctattaattgttgccgggaagctagagtaagtagttcgccagttaatagtttgcgcaacgttgttgccattgctacaggcatcgtggtgtcacgctcgtcgtttggtatggcttcattcagctccggttcccaacgatcaaggcgagttacatgatcccccatgttgtgcaaaaaagcggttagctccttcggtcctccgatcgttgtcagaagtaagttggccgcagtgttatcactcatggttatggcagcactgcataattctcttactgtcatgccatccgtaagatgcttttctgtgactggtgagtactcaaccaagtcattctgagaatagtgtatgcggcgaccgagttgctcttgcccggcgtcaatacgggataataccgcgccacatagcagaactttaaaagtgctcatcattggaaaacgttcttcggggcgaaaactctcaaggatcttaccgctgttgagatccagttcgatgtaacccactcgtgcacccaactgatcttcagcatcttttactttcaccagcgtttctgggtgagcaaaaacaggaaggcaaaatgccgcaaaaaagggaataagggcgacacggaaatgttgaatactcatactcttcctttttcaatattattgaagcatttatcagggttattgtctcatgagcggatacatatttgaatgtatttagaaaaataaacaaataggggttccgcgcacatttccccgaaaagtgccacctgacgtc

SEQ ID NO: 151 - DNA, 264 bp, Artificial sequence
  synthetic
  CDS (1)..(264): gene encoding GFP with 4 tandem repeats of the 11th   barrel
atgtacacaatcgttgaacagtacgagagggcagagggtaggcatagcacaggtggagggggcagtggcggctacaccatcgtcgagcaatatgagagagctgaaggccgccactctacaggtggaggaggttctggtgggtataccatcgttgaacagtacgaacgcgctgagggcaggcactccacaggaggtggtggtagtggggggtataccatcgtcgagcagtacgagcgcgccgagggcaggcacagtaccggtggt

SEQ ID NO: 152 - protein, 88 aa, Artificial sequence
  Synthetic Construct
MYTIVEQYERAEGRHSTGGGGSGGYTIVEQYERAEGRHSTGGGGSGGYTIVEQYERAEGRHSTGGGGSGGYTIVEQYERAEGRHSTGG

SEQ ID NO: 153 - DNA, 5070 bp, Artificial sequence
  synthetic
  misc_feature (1)..(5070): pcDNA 5/FRT plasmid
gacggatcgggagatctcccgatcccctatggtgcactctcagtacaatctgctctgatgccgcatagttaagccagtatctgctccctgcttgtgtgttggaggtcgctgagtagtgcgcgagcaaaatttaagctacaacaaggcaaggcttgaccgacaattgcatgaagaatctgcttagggttaggcgttttgcgctgcttcgcgatgtacgggccagatatacgcgttgacattgattattgactagttattaatagtaatcaattacggggtcattagttcatagcccatatatggagttccgcgttacataacttacggtaaatggcccgcctggctgaccgcccaacgacccccgcccattgacgtcaataatgacgtatgttcccatagtaacgccaatagggactttccattgacgtcaatgggtggagtatttacggtaaactgcccacttggcagtacatcaagtgtatcatatgccaagtacgccccctattgacgtcaatgacggtaaatggcccgcctggcattatgcccagtacatgaccttatgggactttcctacttggcagtacatctacgtattagtcatcgctattaccatggtgatgcggttttggcagtacatcaatgggcgtggatagcggtttgactcacggggatttccaagtctccaccccattgacgtcaatgggagtttgttttggcaccaaaatcaacgggactttccaaaatgtcgtaacaactccgccccattgacgcaaatgggcggtaggcgtgtacggtgggaggtctatataagcagagctctctggctaactagagaacccactgcttactggcttatcgaaattaatacgactcactatagggagacccaagctggctagcgtttaaacttaagcttggtaccgagctcggatccactagtccagtgtggtggaattctgcagatatccagcacagtggcggccgctcgagtctagagggcccgtttaaacccgctgatcagcctcgactgtgccttctagttgccagccatctgttgtttgcccctcccccgtgccttccttgaccctggaaggtgccactcccactgtcctttcctaataaaatgaggaaattgcatcgcattgtctgagtaggtgtcattctattctggggggtggggtggggcaggacagcaagggggaggattgggaagacaatagcaggcatgctggggatgcggtgggctctatggcttctgaggcggaaagaaccagctggggctctagggggtatccccacgcgccctgtagcggcgcattaagcgcggcgggtgtggtggttacgcgcagcgtgaccgctacacttgccagcgccctagcgcccgctcctttcgctttcttcccttcctttctcgccacgttcgccggctttccccgtcaagctctaaatcgggggctccctttagggttccgatttagtgctttacggcacctcgaccccaaaaaacttgattagggtgatggttcacgtacctagaagttcctattccgaagttcctattctctagaaagtataggaacttccttggccaaaaagcctgaactcaccgcgacgtctgtcgagaagtttctgatcgaaaagttcgacagcgtctccgacctgatgcagctctcggagggcgaagaatctcgtgctttcagcttcgatgtaggagggcgtggatatgtcctgcgggtaaatagctgcgccgatggtttctacaaagatcgttatgtttatcggcactttgcatcggccgcgctcccgattccggaagtgcttgacattggggaattcagcgagagcctgacctattgcatctcccgccgtgcacagggtgtcacgttgcaagacctgcctgaaaccgaactgcccgctgttctgcagccggtcgcggaggccatggatgcgatcgctgcggccgatcttagccagacgagcgggttcggcccattcggaccgcaaggaatcggtcaatacactacatggcgtgatttcatatgcgcgattgctgatccccatgtgtatcactggcaaactgtgatggacgacaccgtcagtgcgtccgtcgcgcaggctctcgatgagctgatgctttgggccgaggactgccccgaagtccggcacctcgtgcacgcggatttcggctccaacaatgtcctgacggacaatggccgcataacagcggtcattgactggagcgaggcgatgttcggggattcccaatacgaggtcgccaacatcttcttctggaggccgtggttggcttgtatggagcagcagacgcgctacttcgagcggaggcatccggagcttgcaggatcgccgcggctccgggcgtatatgctccgcattggtcttgaccaactctatcagagcttggttgacggcaatttcgatgatgcagcttgggcgcagggtcgatgcgacgcaatcgtccgatccggagccgggactgtcgggcgtacacaaatcgcccgcagaagcgcggccgtctggaccgatggctgtgtagaagtactcgccgatagtggaaaccgacgccccagcactcgtccgagggcaaaggaatagcacgtactacgagatttcgattccaccgccgccttctatgaaaggttgggcttcggaatcgttttccgggacgccggctggatgatcctccagcgcggggatctcatgctggagttcttcgcccaccccaacttgtttattgcagcttataatggttacaaataaagcaatagcatcacaaatttcacaaataaagcatttttttcactgcattctagttgtggtttgtccaaactcatcaatgtatcttatcatgtctgtataccgtcgacctctagctagagcttggcgtaatcatggtcatagctgtttcctgtgtgaaattgttatccgctcacaattccacacaacatacgagccggaagcataaagtgtaaagcctggggtgcctaatgagtgagctaactcacattaattgcgttgcgctcactgcccgctttccagtcgggaaacctgtcgtgccagctgcattaatgaatcggccaacgcgcggggagaggcggtttgcgtattgggcgctcttccgcttcctcgctcactgactcgctgcgctcggtcgttcggctgcggcgagcggtatcagctcactcaaaggcggtaatacggttatccacagaatcaggggataacgcaggaaagaacatgtgagcaaaaggccagcaaaaggccaggaaccgtaaaaaggccgcgttgctggcgtttttccataggctccgcccccctgacgagcatcacaaaaatcgacgctcaagtcagaggtggcgaaacccgacaggactataaagataccaggcgtttccccctggaagctccctcgtgcgctctcctgttccgaccctgccgcttaccggatacctgtccgcctttctcccttcgggaagcgtggcgctttctcatagctcacgctgtaggtatctcagttcggtgtaggtcgttcgctccaagctgggctgtgtgcacgaaccccccgttcagcccgaccgctgcgccttatccggtaactatcgtcttgagtccaacccggtaagacacgacttatcgccactggcagcagccactggtaacaggattagcagagcgaggtatgtaggcggtgctacagagttcttgaagtggtggcctaactacggctacactagaaggacagtatttggtatctgcgctctgctgaagccagttaccttcggaaaaagagttggtagctcttgatccggcaaacaaaccaccgctggtagcggtggtttttttgtttgcaagcagcagattacgcgcagaaaaaaaggatctcaagaagatcctttgatcttttctacggggtctgacgctcagtggaacgaaaactcacgttaagggattttggtcatgagattatcaaaaaggatcttcacctagatccttttaaattaaaaatgaagttttaaatcaatctaaagtatatatgagtaaacttggtctgacagttaccaatgcttaatcagtgaggcacctatctcagcgatctgtctatttcgttcatccatagttgcctgactccccgtcgtgtagataactacgatacgggagggcttaccatctggccccagtgctgcaatgataccgcgagacccacgctcaccggctccagatttatcagcaataaaccagccagccggaagggccgagcgcagaagtggtcctgcaactttatccgcctccatccagtctattaattgttgccgggaagctagagtaagtagttcgccagttaatagtttgcgcaacgttgttgccattgctacaggcatcgtggtgtcacgctcgtcgtttggtatggcttcattcagctccggttcccaacgatcaaggcgagttacatgatcccccatgttgtgcaaaaaagcggttagctccttcggtcctccgatcgttgtcagaagtaagttggccgcagtgttatcactcatggttatggcagcactgcataattctcttactgtcatgccatccgtaagatgcttttctgtgactggtgagtactcaaccaagtcattctgagaatagtgtatgcggcgaccgagttgctcttgcccggcgtcaatacgggataataccgcgccacatagcagaactttaaaagtgctcatcattggaaaacgttcttcggggcgaaaactctcaaggatcttaccgctgttgagatccagttcgatgtaacccactcgtgcacccaactgatcttcagcatcttttactttcaccagcgtttctgggtgagcaaaaacaggaaggcaaaatgccgcaaaaaagggaataagggcgacacggaaatgttgaatactcatactcttcctttttcaatattattgaagcatttatcagggttattgtctcatgagcggatacatatttgaatgtatttagaaaaataaacaaataggggttccgcgcacatttccccgaaaagtgccacctgacgtc

SEQ ID NO: 154 - DNA, 584 bp, Artificial sequence
  synthetic
  promoter (1)..(584): CMV enhancer/promoter
gacattgattattgactagttattaatagtaatcaattacggggtcattagttcatagcccatatatggagttccgcgttacataacttacggtaaatggcccgcctggctgaccgcccaacgacccccgcccattgacgtcaataatgacgtatgttcccatagtaacgccaatagggactttccattgacgtcaatgggtggagtatttacggtaaactgcccacttggcagtacatcaagtgtatcatatgccaagtacgccccctattgacgtcaatgacggtaaatggcccgcctggcattatgcccagtacatgaccttatgggactttcctacttggcagtacatctacgtattagtcatcgctattaccatggtgatgcggttttggcagtacatcaatgggcgtggatagcggtttgactcacggggatttccaagtctccaccccattgacgtcaatgggagtttgttttggcaccaaaatcaacgggactttccaaaatgtcgtaacaactccgccccattgacgcaaatgggcggtaggcgtgtacggtgggaggtctatataagcagagct

SEQ ID NO: 155 - DNA, 19 bp, Artificial sequence
  synthetic
  precursor_RNA (1)..(19): T7 promoter
taatacgactcactatagg

SEQ ID NO: 156 - DNA, 106 bp, Artificial sequence
  synthetic
  misc_feature (1)..(106): digested sequence for FP1-10 insertion
ctagcgtttaaacttaagcttggtaccgagctcggatccactagtccagtgtggtggaattctgcagatatccagcacagtggcggccgctcgagtctagagggcc

SEQ ID NO: 157 - DNA, 48 bp, Artificial sequence
  synthetic
  misc_feature (1)..(48): FRT
gaagttcctattccgaagttcctattctctagaaagtataggaacttc

SEQ ID NO: 158 - DNA, 5785 bp, Artificial sequence
  synthetic
  misc_feature (1)..(5785): pOG44 FLP plasmid
ccgcggtctttcggacttttgaaagtgatggtggtgggggaaggattcgaaccttcgaagtcgatgacggcagatttagagtctgctccctgcttgtgtgttggaggtcgctgagtagtgcgcgagcaaaatttaagctacaacaaggcaaggcttgaccgacaattgcatgaagaatctgcttagggttaggcgttttgcgctgcttcgcgatgtacgggccagatatacgcgttgacattgattattgactagttattaatagtaatcaattacggggtcattagttcatagcccatatatggagttccgcgttacataacttacggtaaatggcccgcctggctgaccgcccaacgacccccgcccattgacgtcaataatgacgtatgttcccatagtaacgccaatagggactttccattgacgtcaatgggtggagtatttacggtaaactgcccacttggcagtacatcaagtgtatcatatgccaagtacgccccctattgacgtcaatgacggtaaatggcccgcctggcattatgcccagtacatgaccttatgggactttcctacttggcagtacatctacgtattagtcatcgctattaccatggtgatgcggttttggcagtacatcaatgggcgtggatagcggtttgactcacggggatttccaagtctccaccccattgacgtcaatgggagtttgttttggcaccaaaatcaacgggactttccaaaatgtcgtaacaactccgccccattgacgcaaatgggcggtaggcgtgtacggtgggaggtctatataagcagagctctctggctaactagagaacccactgcttactggcttatcgaaattaatacgactcactatagggagacccaagcttctagaattcgctgtctgcgagggccagctgttggggtgagtactccctctcaaaagcgggcatgacttctgcgctaagattgtcagtttccaaaaacgaggaggatttgatattcacctggcccgcggtgatgcctttgagggtggccgcgtccatctggtcagaaaagacaatctttttgttgtcaagcttgaggtgtggcaggcttgagatctggccatacacttgagtgacaatgacatccactttgcctttctctccacaggtgtccactcccaggtccaactgcagcccaagcttccaccatgccacaatttgatatattatgtaaaacaccacctaaggtgcttgttcgtcagtttgtggaaaggtttgaaagaccttcaggtgagaaaatagcattatgtgctgctgaactaacctatttatgttggatgattacacataacggaacagcaatcaagagagccacattcatgagctataatactatcataagcaattcgctgagtttggatattgtcaacaagtcactgcagtttaaatacaagacgcaaaaagcaacaattctggaagcctcattaaagaaattgattcctgcttgggaatttacaattattccttactatggacaaaaacatcaatctgatatcactgatattgtaagtagtttgcaattacagttcgaatcatcggaagaagcagataagggaaatagccacagtaaaaaaatgcttaaagcacttctaagtgagggtgaaagcatctgggagatcactgagaaaatactaaattcgtttgagtatacttcgagatttacaaaaacaaaaactttataccaattcctcttcctagctactttcatcaattgtggaagattcagcgatattaagaacgttgatccgaaatcatttaaattagtccaaaataagtatctgggagtaataatccagtgtttagtgacagagacaaagacaagcgttagtaggcacatatacttctttagcgcaaggggtaggatcgatccacttgtatatttggatgaatttttgaggaattctgaaccagtcctaaaacgagtaaataggaccggcaattcttcaagcaacaagcaggaataccaattattaaaagataacttagtcagatcgtacaacaaagctttgaagaaaaatgcgccttattcaatctttgctataaaaaatggcccaaaatctcacattggaagacatttgatgacctcatttctttcaatgaagggcctaacggagttgactaatgttgtgggaaattggagcgataagcgtgcttctgccgtggccaggacaacgtatactcatcagataacagcaatacctgatcactacttcgcactagtttctcggtactatgcatatgatccaatatcaaaggaaatgatagcattgaaggatgagactaatccaattgaggagtggcagcatatagaacagctaaagggtagtgctgaaggaagcatacgataccccgcatggaatgggataatatcacaggaggtactagactacctttcatcctacataaatagacgcatataagtacgcatttaagcataaacacgcactatgccgttcttctcatgtatatatatatacaggcaacacgcagatataggtgcgacgtgaacagtgagctgtatgtgcgggtaccgagctcctcgaggatcagacatgataagatacattgatgagtttggacaaaccacaactagaatgcagtgaaaaaaatgctttatttgtgaaatttgtgatgctattgctttatttgtaaccattataagctgcaataaacaagttatcctcgaggagctcatgagcgcttgtttcggcgtgggtatggtggcaggcccgtggccgggggactgttgggcgccatctccttgcatgcaccattccttgcggcggcggtgctcaacggcctcaacctactactgggctgcttcctaatgcaggagtcgcataagggagagcgtcgacctcgagggggggcccggtacccagcttttgttccctttagtgagggttaattgcgcgcttggcgtaatcatggtcatagctgtttcctgtgtgaaattgttatccgctcacaattccacacaacatacgagccgggagcataaagtgtaaagcctggggtgcctaatgagtgagctaactcacattaattgcgttgcgctcactgcccgctttccagtcgggaaacctgtcgtgccagctgcattaatgaatcggccaacgcgcggggagaggcggtttgcgtattgggcgctcttccgcttcctcgctcactgactcgctgcgctcggtcgttcggctgcggcgagcggtatcagctcactcaaaggcggtaatacggttatccacagaatcaggggataacgcaggaaagaacatgtgagcaaaaggccagcaaaaggccaggaaccgtaaaaaggccgcgttgctggcgtttttccataggctccgcccccctgacgagcatcacaaaaatcgacgctcaagtcagaggtggcgaaacccgacaggactataaagataccaggcgtttccccctggaagctccctcgtgcgctctcctgttccgaccctgccgcttaccggatacctgtccgcctttctcttcgggaagcgtggcgctttctcatagctcacgctgtaggtatctcagttcggtgtaggtcgttcgctccaagctgggctgtgtgcacgaaccccccgttcagcccgaccctgcgccttatccggtaactatcgtcttgagtccaacccggtaagacacgacttatcgccactggcagcagccactggtaacaggattagcagagcgaggtatgtaggcggtgctacagagttcttgaagtggtggcctaactacggctacactagaagaacagtatttggtatctgcgctctgctgaagccagttacttcggaaaaagagttggtagctcttgatccggcaaacaaaccgctggtagcggtggtttttttgtttgcaagcagcagattacgcgcagaaaaaaaggatctcaagaagatcctttgatcttttctacggggtctgacgctcagtggaacgaaaactcacgttaagggattttggtcatgagattatcaaaaaggatcttcacctagatccttttaaattaaaaatgaagttttaaatcaatctaaagtatatatgagtaaacttggtctgacagttaccaatgcttaatcagtgaggcacctatctcagcgatctgtctatttcgttcatccatagttgcctgactccccgtcgtgtagataactacgatacgggagggcttaccatctggccccagtgctgcaatgataccgcgagacccacgctcaccggctccagatttatcagcaataaaccagccagccggaagggccgagcgcagaagtggtcctgcaactttatccgcctccatccagtctattaattgttgccgggaagctagagtaagtagttcgccagttaatagtttgcgcaacgttgttgccattgctacaggcatcgtggtgtcacgctcgtcgtttggtatggcttcattcagctccggttcccaacgatcaaggcgagttacatgatcccccatgttgtgcaaaaaagcggttagctccttcggtcctccgatcgttgtcagaagtaagttggccgcagtgttatcactcatggttatggcagcactgcataattctcttactgtcatgccatccgtaagatgcttttctgtgactggtgagtactcaaccaagtcattctgagaatagtgtatgcggcgaccgagttgctcttgcccggcgtcaatacgggataataccgcgccacatagcagaactttaaaagtgctcatcattggaaaacgttcttcggggcgaaaactctcaaggatcttaccgctgttgagatccagttcgatgtaacccactcgtgcacccaactgatcttcagcatcttttactttcaccagcgtttctgggtgagcaaaaacaggaaggcaaaatgccgcaaaaaagggaataagggcgacacggaaatgttgaatactcatactcttcctttttcaatattattgaagcatttatcagggttattgtctcatgagcggatacatatttgaatgtatttagaaaaataaacaaataggggttccgcgcacatttccccgaaaagtgccactaaattgtaagcgttaatattttgttaaaattcgcgttaaatttttgttaaatcagctcattttttaaccaataggccgaaatcggcaaaatcccttataaatcaaaagaatagaccgagatagggttgagtgttgttccagtttggaacaagagtccactattaaagaacgtggactccaacgtcaaagggcgaaaaaccgtctatcagggcgatggcccactacgtgaaccatcaccctaatcaagttttttggggtcgaggtgccgtaaagcactaaatcggaaccctaaagggagcccccgatttagagcttgacggggaaagccggcgaacgtggcgagaaaggaagggaagaaagcgaaaggagcgggcgctagggcgctggcaagtgtagcggtcacgctgcgcgtaaccaccacacccgccgcgcttaatgcgccgctacagggcgcgtcccattcgccattcaggctgcgcaactgttgggaagggcgatcggtgcgggcctcttcgctattacgccagctggcgaaagggggatgtgctgcaaggcgattaagttgggtaacgccagggttttcccagtcacgacgttgtaaaacgacggccagtgagcgcgcgtaatacgactcactatagggcgaattggagctcca

SEQ ID NO: 159 - DNA, 1272 bp, Artificial sequence
  synthetic
  CDS (1)..(1272): FLP
atgccacaatttgatatattatgtaaaacaccacctaaggtgcttgttcgtcagtttgtggaaaggtttgaaagaccttcaggtgagaaaatagcattatgtgctgctgaactaacctatttatgttggatgattacacataacggaacagcaatcaagagagccacattcatgagctataatactatcataagcaattcgctgagtttggatattgtcaacaagtcactgcagtttaaatacaagacgcaaaaagcaacaattctggaagcctcattaaagaaattgattcctgcttgggaatttacaattattccttactatggacaaaaacatcaatctgatatcactgatattgtaagtagtttgcaattacagttcgaatcatcggaagaagcagataagggaaatagccacagtaaaaaaatgcttaaagcacttctaagtgagggtgaaagcatctgggagatcactgagaaaatactaaattcgtttgagtatacttcgagatttacaaaaacaaaaactttataccaattcctcttcctagctactttcatcaattgtggaagattcagcgatattaagaacgttgatccgaaatcatttaaattagtccaaaataagtatctgggagtaataatccagtgtttagtgacagagacaaagacaagcgttagtaggcacatatacttctttagcgcaaggggtaggatcgatccacttgtatatttggatgaatttttgaggaattctgaaccagtcctaaaacgagtaaataggaccggcaattcttcaagcaacaagcaggaataccaattattaaaagataacttagtcagatcgtacaacaaagctttgaagaaaaatgcgccttattcaatctttgctataaaaaatggcccaaaatctcacattggaagacatttgatgacctcatttctttcaatgaagggcctaacggagttgactaatgttgtgggaaattggagcgataagcgtgcttctgccgtggccaggacaacgtatactcatcagataacagcaatacctgatcactacttcgcactagtttctcggtactatgcatatgatccaatatcaaaggaaatgatagcattgaaggatgagactaatccaattgaggagtggcagcatatagaacagctaaagggtagtgctgaaggaagcatacgataccccgcatggaatgggataatatcacaggaggtactagactacctttcatcctacataaatagacgcatataa

SEQ ID NO: 160 - protein, 423 aa, Artificial sequence
  Synthetic Construct
MPQFDILCKTPPKVLVRQFVERFERPSGEKIALCAAELTYLCWMITHNGTAIKRATFMSYNTIISNSLSLDIVNKSLQFKYKTQKATILEASLKKLIPAWEFTIIPYYGQKHQSDITDIVSSLQLQFESSEEADKGNSHSKKMLKALLSEGESIWEITEKILNSFEYTSRFTKTKTLYQFLFLATFINCGRFSDIKNVDPKSFKLVQNKYLGVIIQCLVTETKTSVSRHIYFFSARGRIDPLVYLDEFLRNSEPVLKRVNRTGNSSSNKQEYQLLKDNLVRSYNKALKKNAPYSIFAIKNGPKSHIGRHLMTSFLSMKGLTELTNVVGNWSDKRASAVARTTYTHQITAIPDHYFALVSRYYAYDPISKEMIALKDETNPIEEWQHIEQLKGSAEGSIRYPAWNGIISQEVLDYLSSYINRRI

SEQ ID NO: 161 - DNA, 6076 bp, Artificial sequence
  synthetic
  misc_feature (1)..(6076): pcDNA3.1-GFP(1-10) plasmid
gacattgattattgactagttattaatagtaatcaattacggggtcattagttcatagcccatatatggagttccgcgttacataacttacggtaaatggcccgcctggctgaccgcccaacgacccccgcccattgacgtcaataatgacgtatgttcccatagtaacgccaatagggactttccattgacgtcaatgggtggagtatttacggtaaactgcccacttggcagtacatcaagtgtatcatatgccaagtacgccccctattgacgtcaatgacggtaaatggcccgcctggcattatgcccagtacatgaccttatgggactttcctacttggcagtacatctacgtattagtcatcgctattaccatggtgatgcggttttggcagtacatcaatgggcgtggatagcggtttgactcacggggatttccaagtctccaccccattgacgtcaatgggagtttgttttggcaccaaaatcaacgggactttccaaaatgtcgtaacaactccgccccattgacgcaaatgggcggtaggcgtgtacggtgggaggtctatataagcagagctctctggctaactagagaacccactgcttactggcttatcgaaattaatacgactcactatagggagacccaagctggctagcgtttaaacttaagcttggtaccgagctcggatccactagtccagtgtggtggaattcgttaacagatctatgtccaaaggagaagaactgtttaccggtgttgtgccaattttggttgaactcgatggtgatgtcaacggacataagttctcagtgagaggcgaaggagaaggtgacgccaccattggaaaattgactcttaaattcatctgtactactggtaaacttcctgtaccatggccgactctcgtaacaacgcttacgtacggagttcagtgcttttcgagatacccagaccatatgaaaagacatgacttttttaagtcggctatgcctgaaggttacgtgcaagaaagaacaatttcgttcaaagatgatggaaaatataaaactagagcagttgttaaatttgaaggagatactttggttaaccgcattgaactgaaaggaacagattttaaagaagatggtaatattcttggacacaaactcgaatacaattttaatagtcataacgtatacatcactgctgataagcaaaagaacggaattaaagcgaatttcacagtacgccataatgtagaagatggcagtgttcaacttgccgaccattaccaacaaaacacccctattggagacggtccggtacttcttcctgataatcactacctctcaacacaaacagtcctgagcaaagatccaaatgaaaaaggaacaggtggcggcggaagttagtctagagggcccgtttaaacccgctgatcagcctcgactgtgccttctagttgccagccatctgttgtttgcccctcccccgtgccttccttgaccctggaaggtgccactcccactgtcctttcctaataaaatgaggaaattgcatcgcattgtctgagtaggtgtcattctattctggggggtggggtggggcaggacagcaagggggaggattgggaagacaatagcaggcatgctggggatgcggtgggctctatggcttctgaggcggaaagaaccagctggggctctagggggtatccccacgcgccctgtagcggcgcattaagcgcggcgggtgtggtggttacgcgcagcgtgaccgctacacttgccagcgccctagcgcccgctcctttcgctttcttcccttcctttctcgccacgttcgccggctttccccgtcaagctctaaatcgggggctccctttagggttccgatttagtgctttacggcacctcgaccccaaaaaacttgattagggtgatggttcacgtagtgggccatcgccctgatagacggtttttcgccctttgacgttggagtccacgttctttaatagtggactcttgttccaaactggaacaacactcaaccctatctcggtctattcttttgatttataagggattttgccgatttcggcctattggttaaaaaatgagctgatttaacaaaaatttaacgcgaattaattctgtggaatgtgtgtcagttagggtgtggaaagtccccaggctccccagcaggcagaagtatgcaaagcatgcatctcaattagtcagcaaccaggtgtggaaagtccccaggctccccagcaggcagaagtatgcaaagcatgcatctcaattagtcagcaaccatagtcccgcccctaactccgcccatcccgcccctaactccgcccagttccgcccattctccgccccatggctgactaattttttttatttatgcagaggccgaggccgcctctgcctctgagctattccagaagtagtgaggaggcttttttggaggcctaggcttttgcaaaaagctcccgggagcttatatatccattttcggatctgatcaagagacaggatgaggatcgtttcgcatgattgaacaagatggattgcacgcaggttctccggccgcttgggtggagaggctattcggctatgactgggcacaacagacaatcggctgctctgatgccgccgtgttccggctgtcagcgcaggggcgcccggttctttttgtcaagaccgacctgtccggtgccctgaatgaactgcaggacgaggcagcgcggctatcgtggctggccacgacgggcgttccttgcgcagctgtgctcgacgttgtcactgaagcgggaagggactggctgctattgggcgaagtgccggggcaggatctcctgtcatctcaccttgctcctgccgagaaagtatccatcatggctgatgcaatgcggcggctgcatacgcttgatccggctacctgcccattcgaccaccaagcgaaacatcgcatcgagcgagcacgtactcggatggaagccggtcttgtcgatcaggatgatctggacgaagagcatcaggggctcgcgccagccgaactgttcgccaggctcaaggcgcgcatgcccgacggcgaggatctcgtcgtgacccatggcgatgcctgcttgccgaatatcatggtggaaaatggccgcttttctggattcatcgactgtggccggctgggtgtggcggaccgctatcaggacatagcgttggctacccgtgatattgctgaagagcttggcggcgaatgggctgaccgcttcctcgtgctttacggtatcgccgctcccgattcgcagcgcatcgccttctatcgccttcttgacgagttcttctgagcgggactctggggttcgaaatgaccgaccaagcgacgcccaacctgccatcacgagatttcgattccaccgccgccttctatgaaaggttgggcttcggaatcgttttccgggacgccggctggatgatcctccagcgcggggatctcatgctggagttcttcgcccaccccaacttgtttattgcagcttataatggttacaaataaagcaatagcatcacaaatttcacaaataaagcatttttttcactgcattctagttgtggtttgtccaaactcatcaatgtatcttatcatgtctgtataccgtcgacctctagctagagcttggcgtaatcatggtcatagctgtttcctgtgtgaaattgttatccgctcacaattccacacaacatacgagccggaagcataaagtgtaaagcctggggtgcctaatgagtgagctaactcacattaattgcgttgcgctcactgcccgctttccagtcgggaaacctgtcgtgccagctgcattaatgaatcggccaacgcgcggggagaggcggtttgcgtattgggcgctcttccgcttcctcgctcactgactcgctgcgctcggtcgttcggctgcggcgagcggtatcagctcactcaaaggcggtaatacggttatccacagaatcaggggataacgcaggaaagaacatgtgagcaaaaggccagcaaaaggccaggaaccgtaaaaaggccgcgttgctggcgtttttccataggctccgcccccctgacgagcatcacaaaaatcgacgctcaagtcagaggtggcgaaacccgacaggactataaagataccaggcgtttccccctggaagctccctcgtgcgctctcctgttccgaccctgccgcttaccggatacctgtccgcctttctcccttcgggaagcgtggcgctttctcatagctcacgctgtaggtatctcagttcggtgtaggtcgttcgctccaagctgggctgtgtgcacgaaccccccgttcagcccgaccgctgcgccttatccggtaactatcgtcttgagtccaacccggtaagacacgacttatcgccactggcagcagccactggtaacaggattagcagagcgaggtatgtaggcggtgctacagagttcttgaagtggtggcctaactacggctacactagaagaacagtatttggtatctgcgctctgctgaagccagttaccttcggaaaaagagttggtagctcttgatccggcaaacaaaccaccgctggtagcggtggtttttttgtttgcaagcagcagattacgcgcagaaaaaaaggatctcaagaagatcctttgatcttttctacggggtctgacgctcagtggaacgaaaactcacgttaagggattttggtcatgagattatcaaaaaggatcttcacctagatccttttaaattaaaaatgaagttttaaatcaatctaaagtatatatgagtaaacttggtctgacagttaccaatgcttaatcagtgaggcacctatctcagcgatctgtctatttcgttcatccatagttgcctgactccccgtcgtgtagataactacgatacgggagggcttaccatctggccccagtgctgcaatgataccgcgagacccacgctcaccggctccagatttatcagcaataaaccagccagccggaagggccgagcgcagaagtggtcctgcaactttatccgcctccatccagtctattaattgttgccgggaagctagagtaagtagttcgccagttaatagtttgcgcaacgttgttgccattgctacaggcatcgtggtgtcacgctcgtcgtttggtatggcttcattcagctccggttcccaacgatcaaggcgagttacatgatcccccatgttgtgcaaaaaagcggttagctccttcggtcctccgatcgttgtcagaagtaagttggccgcagtgttatcactcatggttatggcagcactgcataattctcttactgtcatgccatccgtaagatgcttttctgtgactggtgagtactcaaccaagtcattctgagaatagtgtatgcggcgaccgagttgctcttgcccggcgtcaatacgggataataccgcgccacatagcagaactttaaaagtgctcatcattggaaaacgttcttcggggcgaaaactctcaaggatcttaccgctgttgagatccagttcgatgtaacccactcgtgcacccaactgatcttcagcatcttttactttcaccagcgtttctgggtgagcaaaaacaggaaggcaaaatgccgcaaaaaagggaataagggcgacacggaaatgttgaatactcatactcttcctttttcaatattattgaagcatttatcagggttattgtctcatgagcggatacatatttgaatgtatttagaaaaataaacaaataggggttccgcgcacatttccccgaaaagtgccacctgacgtcgacggatcgggagatctcccgatcccctatggtgcactctcagtacaatctgctctgatgccgcatagttaagccagtatctgctccctgcttgtgtgttggaggtcgctgagtagtgcgcgagcaaaatttaagctacaacaaggcaaggcttgaccgacaattgcatgaagaatctgcttagggttaggcgttttgcgctgcttcgcgatgtacgggccagatatacgcgtt

SEQ ID NO: 162 - DNA, 642 bp, Artificial sequence
  synthetic
  CDS (1)..(642): gene encoding 1st -10th beta barrels of GFP
atgtccaaaggagaagaactgtttaccggtgttgtgccaattttggttgaactcgatggtgatgtcaacggacataagttctcagtgagaggcgaaggagaaggtgacgccaccattggaaaattgactcttaaattcatctgtactactggtaaacttcctgtaccatggccgactctcgtaacaacgcttacgtacggagttcagtgcttttcgagatacccagaccatatgaaaagacatgacttttttaagtcggctatgcctgaaggttacgtgcaagaaagaacaatttcgttcaaagatgatggaaaatataaaactagagcagttgttaaatttgaaggagatactttggttaaccgcattgaactgaaaggaacagattttaaagaagatggtaatattcttggacacaaactcgaatacaattttaatagtcataacgtatacatcactgctgataagcaaaagaacggaattaaagcgaatttcacagtacgccataatgtagaagatggcagtgttcaacttgccgaccattaccaacaaaacacccctattggagacggtccggtacttcttcctgataatcactacctctcaacacaaacagtcctgagcaaagatccaaatgaaaaa

SEQ ID NO: 163 - protein, 214 aa, Artificial sequence
  Synthetic Construct
MSKGEELFTGVVPILVELDGDVNGHKFSVRGEGEGDATIGKLTLKFICTTGKLPVPWPTLVTTLTYGVQCFSRYPDHMKRHDFFKSAMPEGYVQERTISFKDDGKYKTRAVVKFEGDTLVNRIELKGTDFKEDGNILGHKLEYNFNSHNVYITADKQKNGIKANFTVRHNVEDGSVQLADHYQQNTPIGDGPVLLPDNHYLSTQTVLSKDPNEK

SEQ ID NO: 164 - DNA, 5715 bp, Artificial sequence
  synthetic
  misc_feature (1)..(5715): pcDNA5/FRT/ GFP(1-10) plasmid
gacggatcgggagatctcccgatcccctatggtgcactctcagtacaatctgctctgatgccgcatagttaagccagtatctgctccctgcttgtgtgttggaggtcgctgagtagtgcgcgagcaaaatttaagctacaacaaggcaaggcttgaccgacaattgcatgaagaatctgcttagggttaggcgttttgcgctgcttcgcgatgtacgggccagatatacgcgttgacattgattattgactagttattaatagtaatcaattacggggtcattagttcatagcccatatatggagttccgcgttacataacttacggtaaatggcccgcctggctgaccgcccaacgacccccgcccattgacgtcaataatgacgtatgttcccatagtaacgccaatagggactttccattgacgtcaatgggtggagtatttacggtaaactgcccacttggcagtacatcaagtgtatcatatgccaagtacgccccctattgacgtcaatgacggtaaatggcccgcctggcattatgcccagtacatgaccttatgggactttcctacttggcagtacatctacgtattagtcatcgctattaccatggtgatgcggttttggcagtacatcaatgggcgtggatagcggtttgactcacggggatttccaagtctccaccccattgacgtcaatgggagtttgttttggcaccaaaatcaacgggactttccaaaatgtcgtaacaactccgccccattgacgcaaatgggcggtaggcgtgtacggtgggaggtctatataagcagagctctctggctaactagagaacccactgcttactggcttatcgaaattaatacgactcactatagggagacccaagctggctagcgtttaaacttaagcttggtaccgagctcggatccactagtccagtgtggtggaattcgttaacagatctatgtccaaaggagaagaactgtttaccggtgttgtgccaattttggttgaactcgatggtgatgtcaacggacataagttctcagtgagaggcgaaggagaaggtgacgccaccattggaaaattgactcttaaattcatctgtactactggtaaacttcctgtaccatggccgactctcgtaacaacgcttacgtacggagttcagtgcttttcgagatacccagaccatatgaaaagacatgacttttttaagtcggctatgcctgaaggttacgtgcaagaaagaacaatttcgttcaaagatgatggaaaatataaaactagagcagttgttaaatttgaaggagatactttggttaaccgcattgaactgaaaggaacagattttaaagaagatggtaatattcttggacacaaactcgaatacaattttaatagtcataacgtatacatcactgctgataagcaaaagaacggaattaaagcgaatttcacagtacgccataatgtagaagatggcagtgttcaacttgccgaccattaccaacaaaacacccctattggagacggtccggtacttcttcctgataatcactacctctcaacacaaacagtcctgagcaaagatccaaatgaaaaaggaacaggtggcggcggaagttagtctagagggcccgtttaaacccgctgatcagcctcgactgtgccttctagttgccagccatctgttgtttgcccctcccccgtgccttccttgaccctggaaggtgccactcccactgtcctttcctaataaaatgaggaaattgcatcgcattgtctgagtaggtgtcattctattctggggggtggggtggggcaggacagcaagggggaggattgggaagacaatagcaggcatgctggggatgcggtgggctctatggcttctgaggcggaaagaaccagctggggctctagggggtatccccacgcgccctgtagcggcgcattaagcgcggcgggtgtggtggttacgcgcagcgtgaccgctacacttgccagcgccctagcgcccgctcctttcgctttcttcccttcctttctcgccacgttcgccggctttccccgtcaagctctaaatcgggggctccctttagggttccgatttagtgctttacggcacctcgaccccaaaaaacttgattagggtgatggttcacgtacctagaagttcctattccgaagttcctattctctagaaagtataggaacttccttggccaaaaagcctgaactcaccgcgacgtctgtcgagaagtttctgatcgaaaagttcgacagcgtctccgacctgatgcagctctcggagggcgaagaatctcgtgctttcagcttcgatgtaggagggcgtggatatgtcctgcgggtaaatagctgcgccgatggtttctacaaagatcgttatgtttatcggcactttgcatcggccgcgctcccgattccggaagtgcttgacattggggaattcagcgagagcctgacctattgcatctcccgccgtgcacagggtgtcacgttgcaagacctgcctgaaaccgaactgcccgctgttctgcagccggtcgcggaggccatggatgcgatcgctgcggccgatcttagccagacgagcgggttcggcccattcggaccgcaaggaatcggtcaatacactacatggcgtgatttcatatgcgcgattgctgatccccatgtgtatcactggcaaactgtgatggacgacaccgtcagtgcgtccgtcgcgcaggctctcgatgagctgatgctttgggccgaggactgccccgaagtccggcacctcgtgcacgcggatttcggctccaacaatgtcctgacggacaatggccgcataacagcggtcattgactggagcgaggcgatgttcggggattcccaatacgaggtcgccaacatcttcttctggaggccgtggttggcttgtatggagcagcagacgcgctacttcgagcggaggcatccggagcttgcaggatcgccgcggctccgggcgtatatgctccgcattggtcttgaccaactctatcagagcttggttgacggcaatttcgatgatgcagcttgggcgcagggtcgatgcgacgcaatcgtccgatccggagccgggactgtcgggcgtacacaaatcgcccgcagaagcgcggccgtctggaccgatggctgtgtagaagtactcgccgatagtggaaaccgacgccccagcactcgtccgagggcaaaggaatagcacgtactacgagatttcgattccaccgccgccttctatgaaaggttgggcttcggaatcgttttccgggacgccggctggatgatcctccagcgcggggatctcatgctggagttcttcgcccaccccaacttgtttattgcagcttataatggttacaaataaagcaatagcatcacaaatttcacaaataaagcatttttttcactgcattctagttgtggtttgtccaaactcatcaatgtatcttatcatgtctgtataccgtcgacctctagctagagcttggcgtaatcatggtcatagctgtttcctgtgtgaaattgttatccgctcacaattccacacaacatacgagccggaagcataaagtgtaaagcctggggtgcctaatgagtgagctaactcacattaattgcgttgcgctcactgcccgctttccagtcgggaaacctgtcgtgccagctgcattaatgaatcggccaacgcgcggggagaggcggtttgcgtattgggcgctcttccgcttcctcgctcactgactcgctgcgctcggtcgttcggctgcggcgagcggtatcagctcactcaaaggcggtaatacggttatccacagaatcaggggataacgcaggaaagaacatgtgagcaaaaggccagcaaaaggccaggaaccgtaaaaaggccgcgttgctggcgtttttccataggctccgcccccctgacgagcatcacaaaaatcgacgctcaagtcagaggtggcgaaacccgacaggactataaagataccaggcgtttccccctggaagctccctcgtgcgctctcctgttccgaccctgccgcttaccggatacctgtccgcctttctcccttcgggaagcgtggcgctttctcatagctcacgctgtaggtatctcagttcggtgtaggtcgttcgctccaagctgggctgtgtgcacgaaccccccgttcagcccgaccgctgcgccttatccggtaactatcgtcttgagtccaacccggtaagacacgacttatcgccactggcagcagccactggtaacaggattagcagagcgaggtatgtaggcggtgctacagagttcttgaagtggtggcctaactacggctacactagaaggacagtatttggtatctgcgctctgctgaagccagttaccttcggaaaaagagttggtagctcttgatccggcaaacaaaccaccgctggtagcggtggtttttttgtttgcaagcagcagattacgcgcagaaaaaaaggatctcaagaagatcctttgatcttttctacggggtctgacgctcagtggaacgaaaactcacgttaagggattttggtcatgagattatcaaaaaggatcttcacctagatccttttaaattaaaaatgaagttttaaatcaatctaaagtatatatgagtaaacttggtctgacagttaccaatgcttaatcagtgaggcacctatctcagcgatctgtctatttcgttcatccatagttgcctgactccccgtcgtgtagataactacgatacgggagggcttaccatctggccccagtgctgcaatgataccgcgagacccacgctcaccggctccagatttatcagcaataaaccagccagccggaagggccgagcgcagaagtggtcctgcaactttatccgcctccatccagtctattaattgttgccgggaagctagagtaagtagttcgccagttaatagtttgcgcaacgttgttgccattgctacaggcatcgtggtgtcacgctcgtcgtttggtatggcttcattcagctccggttcccaacgatcaaggcgagttacatgatcccccatgttgtgcaaaaaagcggttagctccttcggtcctccgatcgttgtcagaagtaagttggccgcagtgttatcactcatggttatggcagcactgcataattctcttactgtcatgccatccgtaagatgcttttctgtgactggtgagtactcaaccaagtcattctgagaatagtgtatgcggcgaccgagttgctcttgcccggcgtcaatacgggataataccgcgccacatagcagaactttaaaagtgctcatcattggaaaacgttcttcggggcgaaaactctcaaggatcttaccgctgttgagatccagttcgatgtaacccactcgtgcacccaactgatcttcagcatcttttactttcaccagcgtttctgggtgagcaaaaacaggaaggcaaaatgccgcaaaaaagggaataagggcgacacggaaatgttgaatactcatactcttcctttttcaatattattgaagcatttatcagggttattgtctcatgagcggatacatatttgaatgtatttagaaaaataaacaaataggggttccgcgcacatttccccgaaaagtgccacctgacgtc

SEQ ID NO: 165 - DNA, 6052 bp, Artificial sequence
  synthetic
  misc_feature (1)..(6052): pcDNA3.1_sfCherry2(1-10) plasmid
gacggatcgggagatctcccgatcccctatggtgcactctcagtacaatctgctctgatgccgcatagttaagccagtatctgctccctgcttgtgtgttggaggtcgctgagtagtgcgcgagcaaaatttaagctacaacaaggcaaggcttgaccgacaattgcatgaagaatctgcttagggttaggcgttttgcgctgcttcgcgatgtacgggccagatatacgcgttgacattgattattgactagttattaatagtaatcaattacggggtcattagttcatagcccatatatggagttccgcgttacataacttacggtaaatggcccgcctggctgaccgcccaacgacccccgcccattgacgtcaataatgacgtatgttcccatagtaacgccaatagggactttccattgacgtcaatgggtggagtatttacggtaaactgcccacttggcagtacatcaagtgtatcatatgccaagtacgccccctattgacgtcaatgacggtaaatggcccgcctggcattatgcccagtacatgaccttatgggactttcctacttggcagtacatctacgtattagtcatcgctattaccatggtgatgcggttttggcagtacatcaatgggcgtggatagcggtttgactcacggggatttccaagtctccaccccattgacgtcaatgggagtttgttttggcaccaaaatcaacgggactttccaaaatgtcgtaacaactccgccccattgacgcaaatgggcggtaggcgtgtacggtgggaggtctatataagcagagctctctggctaactagagaacccactgcttactggcttatcgaaattaatacgactcactatagggagacccaagctggctagcgtttaaacttaagcttggtaccatggaggaggacaacatggccatcatcaaggagttcatgagattcaaggtgcacatggagggcagcgtgaacggccacgagttcgagatcgagggcgagggcgagggccacccctacgagggcacccagaccgccaagctgaaggtgaccaagggcggccccctgcccttcgcctgggacatcctgagcccccagttcatgtacggcagcaaggcctacgtgaagcaccccgccgacatccccgactacctgaagctgagcttccccgagggcttcacctgggagagagtgatgaacttcgaggacggcggcgtggtgaccgtgacccaggacagcagcctgcaggacggccagttcatctacaaggtgaagctgctgggcatcaacttccccagcgacggccccgtgatgcagaagaagaccatgggctgggaggccagcaccgagagaatgtaccccgaggacggcgccctgaagggcgagatcaaccagagactgaagctgaaggacggcggccactacgacgccgaggtgaagaccacctacaaggccaagaagcccgtgcagctgcccggcgcctacaacgtggacatcaagctggacatcaccagccacaacgaggactgaggatccactagtccagtgtggtggaattctgcagatatccagcacagtggcggccgctcgagtctagagggcccgtttaaacccgctgatcagcctcgactgtgccttctagttgccagccatctgttgtttgcccctcccccgtgccttccttgaccctggaaggtgccactcccactgtcctttcctaataaaatgaggaaattgcatcgcattgtctgagtaggtgtcattctattctggggggtggggtggggcaggacagcaagggggaggattgggaagacaatagcaggcatgctggggatgcggtgggctctatggcttctgaggcggaaagaaccagctggggctctagggggtatccccacgcgccctgtagcggcgcattaagcgcggcgggtgtggtggttacgcgcagcgtgaccgctacacttgccagcgccctagcgcccgctcctttcgctttcttcccttcctttctcgccacgttcgccggctttccccgtcaagctctaaatcgggggctccctttagggttccgatttagtgctttacggcacctcgaccccaaaaaacttgattagggtgatggttcacgtagtgggccatcgccctgatagacggtttttcgccctttgacgttggagtccacgttctttaatagtggactcttgttccaaactggaacaacactcaaccctatctcggtctattcttttgatttataagggattttgccgatttcggcctattggttaaaaaatgagctgatttaacaaaaatttaacgcgaattaattctgtggaatgtgtgtcagttagggtgtggaaagtccccaggctccccagcaggcagaagtatgcaaagcatgcatctcaattagtcagcaaccaggtgtggaaagtccccaggctccccagcaggcagaagtatgcaaagcatgcatctcaattagtcagcaaccatagtcccgcccctaactccgcccatcccgcccctaactccgcccagttccgcccattctccgccccatggctgactaattttttttatttatgcagaggccgaggccgcctctgcctctgagctattccagaagtagtgaggaggcttttttggaggcctaggcttttgcaaaaagctcccgggagcttatatatccattttcggatctgatcaagagacaggatgaggatcgtttcgcatgattgaacaagatggattgcacgcaggttctccggccgcttgggtggagaggctattcggctatgactgggcacaacagacaatcggctgctctgatgccgccgtgttccggctgtcagcgcaggggcgcccggttctttttgtcaagaccgacctgtccggtgccctgaatgaactgcaggacgaggcagcgcggctatcgtggctggccacgacgggcgttccttgcgcagctgtgctcgacgttgtcactgaagcgggaagggactggctgctattgggcgaagtgccggggcaggatctcctgtcatctcaccttgctcctgccgagaaagtatccatcatggctgatgcaatgcggcggctgcatacgcttgatccggctacctgcccattcgaccaccaagcgaaacatcgcatcgagcgagcacgtactcggatggaagccggtcttgtcgatcaggatgatctggacgaagagcatcaggggctcgcgccagccgaactgttcgccaggctcaaggcgcgcatgcccgacggcgaggatctcgtcgtgacccatggcgatgcctgcttgccgaatatcatggtggaaaatggccgcttttctggattcatcgactgtggccggctgggtgtggcggaccgctatcaggacatagcgttggctacccgtgatattgctgaagagcttggcggcgaatgggctgaccgcttcctcgtgctttacggtatcgccgctcccgattcgcagcgcatcgccttctatcgccttcttgacgagttcttctgagcgggactctggggttcgaaatgaccgaccaagcgacgcccaacctgccatcacgagatttcgattccaccgccgccttctatgaaaggttgggcttcggaatcgttttccgggacgccggctggatgatcctccagcgcggggatctcatgctggagttcttcgcccaccccaacttgtttattgcagcttataatggttacaaataaagcaatagcatcacaaatttcacaaataaagcatttttttcactgcattctagttgtggtttgtccaaactcatcaatgtatcttatcatgtctgtataccgtcgacctctagctagagcttggcgtaatcatggtcatagctgtttcctgtgtgaaattgttatccgctcacaattccacacaacatacgagccggaagcataaagtgtaaagcctggggtgcctaatgagtgagctaactcacattaattgcgttgcgctcactgcccgctttccagtcgggaaacctgtcgtgccagctgcattaatgaatcggccaacgcgcggggagaggcggtttgcgtattgggcgctcttccgcttcctcgctcactgactcgctgcgctcggtcgttcggctgcggcgagcggtatcagctcactcaaaggcggtaatacggttatccacagaatcaggggataacgcaggaaagaacatgtgagcaaaaggccagcaaaaggccaggaaccgtaaaaaggccgcgttgctggcgtttttccataggctccgcccccctgacgagcatcacaaaaatcgacgctcaagtcagaggtggcgaaacccgacaggactataaagataccaggcgtttccccctggaagctccctcgtgcgctctcctgttccgaccctgccgcttaccggatacctgtccgcctttctcccttcgggaagcgtggcgctttctcatagctcacgctgtaggtatctcagttcggtgtaggtcgttcgctccaagctgggctgtgtgcacgaaccccccgttcagcccgaccgctgcgccttatccggtaactatcgtcttgagtccaacccggtaagacacgacttatcgccactggcagcagccactggtaacaggattagcagagcgaggtatgtaggcggtgctacagagttcttgaagtggtggcctaactacggctacactagaagaacagtatttggtatctgcgctctgctgaagccagttaccttcggaaaaagagttggtagctcttgatccggcaaacaaaccaccgctggtagcggtggtttttttgtttgcaagcagcagattacgcgcagaaaaaaaggatctcaagaagatcctttgatcttttctacggggtctgacgctcagtggaacgaaaactcacgttaagggattttggtcatgagattatcaaaaaggatcttcacctagatccttttaaattaaaaatgaagttttaaatcaatctaaagtatatatgagtaaacttggtctgacagttaccaatgcttaatcagtgaggcacctatctcagcgatctgtctatttcgttcatccatagttgcctgactccccgtcgtgtagataactacgatacgggagggcttaccatctggccccagtgctgcaatgataccgcgagacccacgctcaccggctccagatttatcagcaataaaccagccagccggaagggccgagcgcagaagtggtcctgcaactttatccgcctccatccagtctattaattgttgccgggaagctagagtaagtagttcgccagttaatagtttgcgcaacgttgttgccattgctacaggcatcgtggtgtcacgctcgtcgtttggtatggcttcattcagctccggttcccaacgatcaaggcgagttacatgatcccccatgttgtgcaaaaaagcggttagctccttcggtcctccgatcgttgtcagaagtaagttggccgcagtgttatcactcatggttatggcagcactgcataattctcttactgtcatgccatccgtaagatgcttttctgtgactggtgagtactcaaccaagtcattctgagaatagtgtatgcggcgaccgagttgctcttgcccggcgtcaatacgggataataccgcgccacatagcagaactttaaaagtgctcatcattggaaaacgttcttcggggcgaaaactctcaaggatcttaccgctgttgagatccagttcgatgtaacccactcgtgcacccaactgatcttcagcatcttttactttcaccagcgtttctgggtgagcaaaaacaggaaggcaaaatgccgcaaaaaagggaataagggcgacacggaaatgttgaatactcatactcttcctttttcaatattattgaagcatttatcagggttattgtctcatgagcggatacatatttgaatgtatttagaaaaataaacaaataggggttccgcgcacatttccccgaaaagtgccacctgacgtc

SEQ ID NO: 166 - DNA, 624 bp, Artificial sequence
  synthetic
  CDS (1)..(624): gene encoding 1st -10th beta barrel of sfCherry2 protein
atggaggaggacaacatggccatcatcaaggagttcatgagattcaaggtgcacatggagggcagcgtgaacggccacgagttcgagatcgagggcgagggcgagggccacccctacgagggcacccagaccgccaagctgaaggtgaccaagggcggccccctgcccttcgcctgggacatcctgagcccccagttcatgtacggcagcaaggcctacgtgaagcaccccgccgacatccccgactacctgaagctgagcttccccgagggcttcacctgggagagagtgatgaacttcgaggacggcggcgtggtgaccgtgacccaggacagcagcctgcaggacggccagttcatctacaaggtgaagctgctgggcatcaacttccccagcgacggccccgtgatgcagaagaagaccatgggctgggaggccagcaccgagagaatgtaccccgaggacggcgccctgaagggcgagatcaaccagagactgaagctgaaggacggcggccactacgacgccgaggtgaagaccacctacaaggccaagaagcccgtgcagctgcccggcgcctacaacgtggacatcaagctggacatcaccagccacaacgaggac

SEQ ID NO: 167 - protein, 208 aa, Artificial sequence
  Synthetic Construct
MEEDNMAIIKEFMRFKVHMEGSVNGHEFEIEGEGEGHPYEGTQTAKLKVTKGGPLPFAWDILSPQFMYGSKAYVKHPADIPDYLKLSFPEGFTWERVMNFEDGGVVTVTQDSSLQDGQFIYKVKLLGINFPSDGPVMQKKTMGWEASTERMYPEDGALKGEINQRLKLKDGGHYDAEVKTTYKAKKPVQLPGAYNVDIKLDITSHNED

SEQ ID NO: 168 - DNA, 5691 bp, Artificial sequence
  synthetic
  misc_feature (1)..(5691): pcDNA5/FRT/ sfCherry2(1-10) plasmid
gacggatcgggagatctcccgatcccctatggtgcactctcagtacaatctgctctgatgccgcatagttaagccagtatctgctccctgcttgtgtgttggaggtcgctgagtagtgcgcgagcaaaatttaagctacaacaaggcaaggcttgaccgacaattgcatgaagaatctgcttagggttaggcgttttgcgctgcttcgcgatgtacgggccagatatacgcgttgacattgattattgactagttattaatagtaatcaattacggggtcattagttcatagcccatatatggagttccgcgttacataacttacggtaaatggcccgcctggctgaccgcccaacgacccccgcccattgacgtcaataatgacgtatgttcccatagtaacgccaatagggactttccattgacgtcaatgggtggagtatttacggtaaactgcccacttggcagtacatcaagtgtatcatatgccaagtacgccccctattgacgtcaatgacggtaaatggcccgcctggcattatgcccagtacatgaccttatgggactttcctacttggcagtacatctacgtattagtcatcgctattaccatggtgatgcggttttggcagtacatcaatgggcgtggatagcggtttgactcacggggatttccaagtctccaccccattgacgtcaatgggagtttgttttggcaccaaaatcaacgggactttccaaaatgtcgtaacaactccgccccattgacgcaaatgggcggtaggcgtgtacggtgggaggtctatataagcagagctctctggctaactagagaacccactgcttactggcttatcgaaattaatacgactcactatagggagacccaagctggctagcgtttaaacttaagcttggtaccatggaggaggacaacatggccatcatcaaggagttcatgagattcaaggtgcacatggagggcagcgtgaacggccacgagttcgagatcgagggcgagggcgagggccacccctacgagggcacccagaccgccaagctgaaggtgaccaagggcggccccctgcccttcgcctgggacatcctgagcccccagttcatgtacggcagcaaggcctacgtgaagcaccccgccgacatccccgactacctgaagctgagcttccccgagggcttcacctgggagagagtgatgaacttcgaggacggcggcgtggtgaccgtgacccaggacagcagcctgcaggacggccagttcatctacaaggtgaagctgctgggcatcaacttccccagcgacggccccgtgatgcagaagaagaccatgggctgggaggccagcaccgagagaatgtaccccgaggacggcgccctgaagggcgagatcaaccagagactgaagctgaaggacggcggccactacgacgccgaggtgaagaccacctacaaggccaagaagcccgtgcagctgcccggcgcctacaacgtggacatcaagctggacatcaccagccacaacgaggactgaggatccactagtccagtgtggtggaattctgcagatatccagcacagtggcggccgctcgagtctagagggcccgtttaaacccgctgatcagcctcgactgtgccttctagttgccagccatctgttgtttgcccctcccccgtgccttccttgaccctggaaggtgccactcccactgtcctttcctaataaaatgaggaaattgcatcgcattgtctgagtaggtgtcattctattctggggggtggggtggggcaggacagcaagggggaggattgggaagacaatagcaggcatgctggggatgcggtgggctctatggcttctgaggcggaaagaaccagctggggctctagggggtatccccacgcgccctgtagcggcgcattaagcgcggcgggtgtggtggttacgcgcagcgtgaccgctacacttgccagcgccctagcgcccgctcctttcgctttcttcccttcctttctcgccacgttcgccggctttccccgtcaagctctaaatcgggggctccctttagggttccgatttagtgctttacggcacctcgaccccaaaaaacttgattagggtgatggttcacgtacctagaagttcctattccgaagttcctattctctagaaagtataggaacttccttggccaaaaagcctgaactcaccgcgacgtctgtcgagaagtttctgatcgaaaagttcgacagcgtctccgacctgatgcagctctcggagggcgaagaatctcgtgctttcagcttcgatgtaggagggcgtggatatgtcctgcgggtaaatagctgcgccgatggtttctacaaagatcgttatgtttatcggcactttgcatcggccgcgctcccgattccggaagtgcttgacattggggaattcagcgagagcctgacctattgcatctcccgccgtgcacagggtgtcacgttgcaagacctgcctgaaaccgaactgcccgctgttctgcagccggtcgcggaggccatggatgcgatcgctgcggccgatcttagccagacgagcgggttcggcccattcggaccgcaaggaatcggtcaatacactacatggcgtgatttcatatgcgcgattgctgatccccatgtgtatcactggcaaactgtgatggacgacaccgtcagtgcgtccgtcgcgcaggctctcgatgagctgatgctttgggccgaggactgccccgaagtccggcacctcgtgcacgcggatttcggctccaacaatgtcctgacggacaatggccgcataacagcggtcattgactggagcgaggcgatgttcggggattcccaatacgaggtcgccaacatcttcttctggaggccgtggttggcttgtatggagcagcagacgcgctacttcgagcggaggcatccggagcttgcaggatcgccgcggctccgggcgtatatgctccgcattggtcttgaccaactctatcagagcttggttgacggcaatttcgatgatgcagcttgggcgcagggtcgatgcgacgcaatcgtccgatccggagccgggactgtcgggcgtacacaaatcgcccgcagaagcgcggccgtctggaccgatggctgtgtagaagtactcgccgatagtggaaaccgacgccccagcactcgtccgagggcaaaggaatagcacgtactacgagatttcgattccaccgccgccttctatgaaaggttgggcttcggaatcgttttccgggacgccggctggatgatcctccagcgcggggatctcatgctggagttcttcgcccaccccaacttgtttattgcagcttataatggttacaaataaagcaatagcatcacaaatttcacaaataaagcatttttttcactgcattctagttgtggtttgtccaaactcatcaatgtatcttatcatgtctgtataccgtcgacctctagctagagcttggcgtaatcatggtcatagctgtttcctgtgtgaaattgttatccgctcacaattccacacaacatacgagccggaagcataaagtgtaaagcctggggtgcctaatgagtgagctaactcacattaattgcgttgcgctcactgcccgctttccagtcgggaaacctgtcgtgccagctgcattaatgaatcggccaacgcgcggggagaggcggtttgcgtattgggcgctcttccgcttcctcgctcactgactcgctgcgctcggtcgttcggctgcggcgagcggtatcagctcactcaaaggcggtaatacggttatccacagaatcaggggataacgcaggaaagaacatgtgagcaaaaggccagcaaaaggccaggaaccgtaaaaaggccgcgttgctggcgtttttccataggctccgcccccctgacgagcatcacaaaaatcgacgctcaagtcagaggtggcgaaacccgacaggactataaagataccaggcgtttccccctggaagctccctcgtgcgctctcctgttccgaccctgccgcttaccggatacctgtccgcctttctcccttcgggaagcgtggcgctttctcatagctcacgctgtaggtatctcagttcggtgtaggtcgttcgctccaagctgggctgtgtgcacgaaccccccgttcagcccgaccgctgcgccttatccggtaactatcgtcttgagtccaacccggtaagacacgacttatcgccactggcagcagccactggtaacaggattagcagagcgaggtatgtaggcggtgctacagagttcttgaagtggtggcctaactacggctacactagaaggacagtatttggtatctgcgctctgctgaagccagttaccttcggaaaaagagttggtagctcttgatccggcaaacaaaccaccgctggtagcggtggtttttttgtttgcaagcagcagattacgcgcagaaaaaaaggatctcaagaagatcctttgatcttttctacggggtctgacgctcagtggaacgaaaactcacgttaagggattttggtcatgagattatcaaaaaggatcttcacctagatccttttaaattaaaaatgaagttttaaatcaatctaaagtatatatgagtaaacttggtctgacagttaccaatgcttaatcagtgaggcacctatctcagcgatctgtctatttcgttcatccatagttgcctgactccccgtcgtgtagataactacgatacgggagggcttaccatctggccccagtgctgcaatgataccgcgagacccacgctcaccggctccagatttatcagcaataaaccagccagccggaagggccgagcgcagaagtggtcctgcaactttatccgcctccatccagtctattaattgttgccgggaagctagagtaagtagttcgccagttaatagtttgcgcaacgttgttgccattgctacaggcatcgtggtgtcacgctcgtcgtttggtatggcttcattcagctccggttcccaacgatcaaggcgagttacatgatcccccatgttgtgcaaaaaagcggttagctccttcggtcctccgatcgttgtcagaagtaagttggccgcagtgttatcactcatggttatggcagcactgcataattctcttactgtcatgccatccgtaagatgcttttctgtgactggtgagtactcaaccaagtcattctgagaatagtgtatgcggcgaccgagttgctcttgcccggcgtcaatacgggataataccgcgccacatagcagaactttaaaagtgctcatcattggaaaacgttcttcggggcgaaaactctcaaggatcttaccgctgttgagatccagttcgatgtaacccactcgtgcacccaactgatcttcagcatcttttactttcaccagcgtttctgggtgagcaaaaacaggaaggcaaaatgccgcaaaaaagggaataagggcgacacggaaatgttgaatactcatactcttcctttttcaatattattgaagcatttatcagggttattgtctcatgagcggatacatatttgaatgtatttagaaaaataaacaaataggggttccgcgcacatttccccgaaaagtgccacctgacgtc

SEQ ID NO: 169 - DNA, 8202 bp, Artificial sequence
  synthetic
  misc_feature (1)..(8202): pCOLA-pg140 plasmid
ttgacggctagctcagtcctaggtacagtgctagcgcaaagctaaaaaaaatcctgaaactaaggaggtcattatgaaaagacacctaaatacatgttataggcttgtttggaaccacatgaccggcgcgttcgtcgtggcaagcgagttggcgagagcacgtggcaagcgtggcggagtggcagtggcgctgtctttggcagccgtaacaagcttaccggtcctgagcgcggccgaaaacctgtgggttaccgtctactatggtgtaccggtttggaaagacgcggagaccacgctgttctgtgcatcagatgcaaaagcgtatgaaaccgagaagcataacgtttgggcgacccatgcctgcgtgccgacggatccgaatccgcaagagattcacttagagtcagtcaccgaagaatttaatatgtggaaaaataacatggttgagcagatgcacacggacatcatttctctgtgggaccagagcttaaagccgtgcgtaaagttgaccccactgtgtgttaccttgcaatgtaccggtgtgaccaataccattaccgacgatatgcgtggcgaactgaaaagctgtagcttttatatgaccaccgagctgcgcgacaagaaacagaaagtgtacagcctgttctaccgcctggacgtggtgcagattaacgagaaccaaggtacccggagcagtaatagcaataaagaatatcgtctgattaactgcacaacgtccgccatcacccaagcctgcccgaaagtgtcttttgaaccgatcccgatacactattgcgcgccggccggttttgcgatcctgaagtgcaaagataagaaatttagcggcacaggcccatgcccgagcgtttccaccgtgcagtgtacccacggaatcaagccggtagttagcacccaactgcttctggacggttctctagcggaggaagaggttatgattcgctccgaaagcataaccaacaacgcgaaaaatattttggttcaatttaacactccggttcaaatcacctgtacgcgtccgaactacaatacgcgtaaatccatcagaattggtccgggtcaggcgttctacgcgacgggcgacatcatcggcgacatccgccaagcgcactgcagcgtttccaaagcgacctggggcgaaacccttggtaaggttgttaagcagctgcgtaaacactttggcacgaacaccatcattcgtttcgctccgtcttcaggcggcgacttggaagttactacccacagcttcaattgcggtggcgagttcttttactgcagcacctctggcctgttcagttctacctggattagcaccacgtctgtgcagggttcaagctccactggctcaatcgatagcataaccttgccgtgccgtatcaagcaaattattaacatgtggcaacgtattggtcaagcaatgtatgcgccgcctattcagggtgttatccgttgtgttagcagcatcaccggtctgattctgacccgtgatggcggtagcacgacctccactactgaaacctttcgtccgggtggtggcgacatgcgtgataattggcgttccgaattgtacaagtacaaggttgtgaaaatagaaccactgggtgtggcgccgacgcgcgcgaaacgccgcgttgttggtggtggcggcgggtcgggtggtggcggcagcgcagtcggtattggtgcggtttttctgggcttcctgggtgcggcggggtccacaatgggtgctgcgtctatgaccctgaccgtccaggctcgtaacctgttgtccggcattgtgcagcagcagtccaatctgttgcgtgcgattgaggcacagcaacatctgctgaagctgaccgtgtggggtatcaagcaactgcaggcacgagtgttggcggtcgagcgttatctgagggaccagcaactgctgggcatctggggctgctcgggcaagctgatctgcaccacgaacgtgccgtggggctcctcttggagcaatcgtagcttaagcgagatctgggactcaatgacctggttgcaatgggataaagagattagcagctatacccaaattatctatggcctgttggaggaaagccagaatcagcaagaaaagaacgagcaggatctgctggcgctggacaagtgggcgtccctgtggaactggtttgatatcagcaactggctgtggtacattaagatcggtggccaaagcttacagggtcgtgctgttaacactacgttgaatggaggcgagcagtggatgcatgaaggtgcgatcgccaccgggaccgtgattaatgacaagggctggcaagttgttaaaccgggtaccgtagccacggacacagttgtcaataccggcgccgaaggtggtccggatgcagagaacggtgacaccggtcagttcgttcgtggagacgcggtccgtaccaccattaataaaaatggtcgtcagattgtacgtgccgaaggtaccgctaatacgaccgttgtctacgcggggggcgatcaaaccgtgcacggtcacgccctggacaccacgctgaacggtggttatcagtatgttcacaacggtggtacggctagcgatacagtggtgaactccgacggttggcaaattgttaagaacggcggtgtagccggcaacaccaccgttaaccaaaaaggcagattacaagttgatgcaggaggtacggcgaccaacgttaccctcaagcagggtggcgcactggttacttcaaccgcggcgacggtgaccggcatcaaccgcctgggcgcattctctgttgttgagggcaaggcagacaacgtggtcctggagaacggaggccgtctggatgtgctgacgggtcataccgcgaccaacacgcgggtggacgacggcggtacgctggatgtccgcaatggcggaaccgccaccaccgtgagtatgggtaacggtggtgtcttgctggcagatagcggcgcggcggtttcgggcacccgatctgacggtaaggctttctccatcggcggcgggcaggccgatgcactgatgctggaaaagggtagctccttcacccttaacgcgggtgacaccgcaacggacaccacagtgaacggcggtttgttcaccgctagaggtgggaccctcgcgggcaccacgaccctgaacaacggtgcgatcttgaccctgtccggtaaaaccgtgaataacgacaccttaaccatccgcgaaggtgacgctctgttgcaagggggctccctgacaggtaacgggagcgtggaaaaatcaggctctgggactctcactgttagcaacaccacccttacccagaaagcggtgaatctcaatgaagggacgttaaccttaaacgattcgaccgtgacgacagacgtgattgcgcagcgtggcaccgctctgaagctcaccggcagtacggtgctcaacggtgcgatcgatccgacaaacgtgactctggcttctggcgctacctggaatattccggataatgctactgtgcaatccgtggttgatgatttgagccatgcaggtcaaatccattttaccagcacccgcaccggcaaatttgttcccgcaacgttgaaggttaagaacctgaacggtcagaatggcacgatttccttacgcgtgcgtcccgatatggcgcagaacaacgcggatcgtctggtgattgatggtggccgtgcaactggtaagaccatcctgaacctggttaacgcaggtaatagcgcgagcggactggcgaccagcggcaagggtatccaggttgttgaggcgattaacggcgcgaccaccgaagagggtgcgttcgtgcagggtaaccgcctgcaggccggcgcattcaactacagcctgaaccgtgacagcgatgaaagctggtacctgcgatccgagaacgcgtatcgcgcggaagtaccgctgtacgctagcatgctgacgcaggctatggattatgaccgcatcgtcgccggcagccgttcccatcagaccggtgtcaatggcgagaacaacagcgtccgcctgtctattcagggtggtcacctgggtcatgataataatggtggcatcgcacgtggtgccaccccggaaagctccggttcttatggtttcgttcgtttggagggcgacctgatgcgtactgaggttgcgggtatgagcgtgacggctggcgtgtacggtgcagcaggccacagctctgtcgacgtgaaagacgatgacggttctcgtgcgggcaccgtacgagatgacgccggttccctgggtggttacctgaatcttgtccacacctctagcggcttgtgggcagacattgtggcccaaggcacacgtcatagcatgaaagcaagttcggacaataatgattttcgtgcgcgcggttggggttggctgggttccttagagaccggtcttccgtttagcatcacggataacctgatgctggaaccgcagctccaatatacctggcagggcctgagcctagacgacggaaaagacaacgccggctacgttaaattcggccatggtagcgcccaacatgttcgcgctggctttcgtctgggtagccataatgacatgacctttggcgagggcacctcgtcaagagccccgctgcgcgatagcgcgaaacacagcgtctctgaactgccggttaactggtgggtccaaccgagcgtgatccgtactttctcgagccgtggtgatatgcgtgtaggcacaagcaccgcgggttctggaatgaccttcagcccgtcccaaaacggtacatccctcgacctgcaggcgggtttggaggcgcgcgttagagaaaatatcactctaggtgtgcaggcgggttacgcgcacagcgttagcggtagcagcgcggaagggtacaacggccaggcaaccctcaacgtgacgttctaagaggcatcaaataaaacgaaaggctcagtcgaaagactgggcctttcgttttatctgttgtttgtcggtgaacgctctcctgagtaggacaaatctgaaacctcaggcatttgagaagcacacggtcacactgcttccggtagtcaataaaccggtaaaccagcaatagacataagcggctatttaacgaccctgccctgaaccgacgacaagctgacgaccgggtctccgcaagtggcacttttcggggaaatgtgcgcggaacccctatttgtttatttttctaaatacattcaaatatgtatccgctcatgaattaattcttagaaaaactcatcgagcatcaaatgaaactgcaatttattcatatcaggattatcaataccatatttttgaaaaagccgtttctgtaatgaaggagaaaactcaccgaggcagttccataggatggcaagatcctggtatcggtctgcgattccgactcgtccaacatcaatacaacctattaatttcccctcgtcaaaaataaggttatcaagtgagaaatcaccatgagtgacgactgaatccggtgagaatggcaaaagtttatgcatttctttccagacttgttcaacaggccagccattacgctcgtcatcaaaatcactcgcatcaaccaaaccgttattcattcgtgattgcgcctgagcgagacgaaatacgcggtcgctgttaaaaggacaattacaaacaggaatcgaatgcaaccggcgcaggaacactgccagcgcatcaacaatattttcacctgaatcaggatattcttctaatacctggaatgctgttttcccggggatcgcagtggtgagtaaccatgcatcatcaggagtacggataaaatgcttgatggtcggaagaggcataaattccgtcagccagtttagtctgaccatctcatctgtaacatcattggcaacgctacctttgccatgtttcagaaacaactctggcgcatcgggcttcccatacaatcgatagattgtcgcacctgattgcccgacattatcgcgagcccatttatacccatataaatcagcatccatgttggaatttaatcgcggcctagagcaagacgtttcccgttgaatatggctcatactcttcctttttcaatattattgaagcatttatcagggttattgtctcatgagcggatacatatttgaatgtatttagaaaaataaacaaataggcatgctagcgcagaaacgtcctagaagatgccaggaggatacttagcagagagacaataaggccggagcgaagccgtttttccataggctccgcccccctgacgaacatcacgaaatctgacgctcaaatcagtggtggcgaaacccgacaggactataaagataccaggcgtttccccctgatggctccctcttgcgctctcctgttcccgtcctgcggcgtccgtgttgtggtggaggctttacccaaatcaccacgtcccgttccgtgtagacagttcgctccaagctgggctgtgtgcaagaaccccccgttcagcccgactgctgcgccttatccggtaactatcatcttgagtccaacccggaaagacacgacaaaacgccactggcagcagccattggtaactgagaattagtggatttagatatcgagagtcttgaagtggtggcctaacagaggctacactgaaaggacagtatttggtatctgcgctccactaaagccagttaccaggttaagcagttccccaactgacttaaccttcgatcaaaccgcctccccaggcggttttttcgtttacagagcaggagattacgacgatcgtaaaaggatctcaagaagatcctttacggattcccgacaccatcactctagatttcagtgcaatttatctcttcaaatgtagcacctgaagtcagccccatacgatataagttgtaattctcatgttagtcatgccccgcgcccaccggaaggagctgactgggttgaaggctctcaagggcatcggtcgagatcccggtgcctaatgagtgagctaacttacattaattgcgttgcgctcactgcccgctttccagtcgggaaacctgtcgtgccagctgcattaatgaatcggccaacgcgcggggagaggcggtttgcgtattgggcgccagggtggtttttcttttcaccagtgagacgggcaacagctgattgcccttcaccgcctggccctgagagagttgcagcaagcggtccacgctggtttgccccagcaggcgaaaatcctgtttgatggtggttaacggcgggatataacatgagctgtcttcggtatcgtcgtatcccactaccgagatgtccgcaccaacgcgcagcccggactcggtaatggcgcgcattgcgcccagcgccatctgatcgttggcaaccagcatcgcagtgggaacgatgccctcattcagcatttgcatggtttgttgaaaaccggacatggcactccagtcgccttcccgttccgctatcggctgaatttgattgcgagtgagatatttatgccagccagccagacgcagacgcgccgagacagaacttaatgggcccgctaacagcgcgatttgctggtgacccaatgcgaccagatgctccacgcccagtcgcgtaccgtcttcatgggagaaaataatactgttgatgggtgtctggtcagagacatcaagaaataacgccggaacattagtgcaggcagcttccacagcaatggcatcctggtcatccagcggatagttaatgatcagcccactgacgcgttgcgcgagaagattgtgcaccgccgctttacaggcttcgacgccgcttcgttctaccatcgacaccaccacgctggcacccagttgatcggcgcgagatttaatcgccgcgacaatttgcgacggcgcgtgcagggccagactggaggtggcaacgccaatcagcaacgactgtttgcccgccagttgttgtgccacgcggttgggaatgtaattcagctccgccatcgccgcttccactttttcccgcgttttcgcagaaacgtggctggcctggttcaccacgcgggaaacggtctgataagagacaccggcatactctgcgacatcgtataacgttactggtttcacattcaccaccctgaattgactctcttccgggcgctatcatgccataccgcgaaaggttttgcgccattcgatggtgtccgggatctcgacgctctcccttatgcgactcctgcattaggaaat

SEQ ID NO: 170 - DNA, 38 bp, Artificial sequence
  synthetic
  RBS (1)..(38): RBS
gcaaagctaaaaaaaatcctgaaactaaggaggtcatt

SEQ ID NO: 171 - DNA, 153 bp, Artificial sequence
  synthetic
  sig_peptide (1)..(153): Signal peptide (Flu)
atgaaaagacacctaaatacatgttataggcttgtttggaaccacatgaccggcgcgttcgtcgtggcaagcgagttggcgagagcacgtggcaagcgtggcggagtggcagtggcgctgtctttggcagccgtaacaagcttaccggtcctg

SEQ ID NO: 172 - DNA, 1419 bp, Artificial sequence
  synthetic
  CDS (1)..(1419): GP120
agcgcggccgaaaacctgtgggttaccgtctactatggtgtaccggtttggaaagacgcggagaccacgctgttctgtgcatcagatgcaaaagcgtatgaaaccgagaagcataacgtttgggcgacccatgcctgcgtgccgacggatccgaatccgcaagagattcacttagagtcagtcaccgaagaatttaatatgtggaaaaataacatggttgagcagatgcacacggacatcatttctctgtgggaccagagcttaaagccgtgcgtaaagttgaccccactgtgtgttaccttgcaatgtaccggtgtgaccaataccattaccgacgatatgcgtggcgaactgaaaagctgtagcttttatatgaccaccgagctgcgcgacaagaaacagaaagtgtacagcctgttctaccgcctggacgtggtgcagattaacgagaaccaaggtacccggagcagtaatagcaataaagaatatcgtctgattaactgcacaacgtccgccatcacccaagcctgcccgaaagtgtcttttgaaccgatcccgatacactattgcgcgccggccggttttgcgatcctgaagtgcaaagataagaaatttagcggcacaggcccatgcccgagcgtttccaccgtgcagtgtacccacggaatcaagccggtagttagcacccaactgcttctggacggttctctagcggaggaagaggttatgattcgctccgaaagcataaccaacaacgcgaaaaatattttggttcaatttaacactccggttcaaatcacctgtacgcgtccgaactacaatacgcgtaaatccatcagaattggtccgggtcaggcgttctacgcgacgggcgacatcatcggcgacatccgccaagcgcactgcagcgtttccaaagcgacctggggcgaaacccttggtaaggttgttaagcagctgcgtaaacactttggcacgaacaccatcattcgtttcgctccgtcttcaggcggcgacttggaagttactacccacagcttcaattgcggtggcgagttcttttactgcagcacctctggcctgttcagttctacctggattagcaccacgtctgtgcagggttcaagctccactggctcaatcgatagcataaccttgccgtgccgtatcaagcaaattattaacatgtggcaacgtattggtcaagcaatgtatgcgccgcctattcagggtgttatccgttgtgttagcagcatcaccggtctgattctgacccgtgatggcggtagcacgacctccactactgaaacctttcgtccgggtggtggcgacatgcgtgataattggcgttccgaattgtacaagtacaaggttgtgaaaatagaaccactgggtgtggcgccgacgcgcgcgaaacgc

SEQ ID NO: 173 - protein, 473 aa, Artificial sequence
  Synthetic Construct
SAAENLWVTVYYGVPVWKDAETTLFCASDAKAYETEKHNVWATHACVPTDPNPQEIHLESVTEEFNMWKNNMVEQMHTDIISLWDQSLKPCVKLTPLCVTLQCTGVTNTITDDMRGELKSCSFYMTTELRDKKQKVYSLFYRLDVVQINENQGTRSSNSNKEYRLINCTTSAITQACPKVSFEPIPIHYCAPAGFAILKCKDKKFSGTGPCPSVSTVQCTHGIKPVVSTQLLLDGSLAEEEVMIRSESITNNAKNILVQFNTPVQITCTRPNYNTRKSIRIGPGQAFYATGDIIGDIRQAHCSVSKATWGETLGKVVKQLRKHFGTNTIIRFAPSSGGDLEVTTHSFNCGGEFFYCSTSGLFSSTWISTTSVQGSSSTGSIDSITLPCRIKQIINMWQRIGQAMYAPPIQGVIRCVSSITGLILTRDGGSTTSTTETFRPGGGDMRDNWRSELYKYKVVKIEPLGVAPTRAKR

SEQ ID NO: 174 - DNA, 33 bp, Artificial sequence
  synthetic
  CDS (1)..(33): 2x G5S
ggtggtggcggcgggtcgggtggtggcggcagc

SEQ ID NO: 175 - protein, 11 aa, Artificial sequence
  Synthetic Construct
GGGGGSGGGGS

SEQ ID NO: 176 - DNA, 519 bp, Artificial sequence
  synthetic
  CDS (1)..(519): GP41 (Ectodomain)
gcagtcggtattggtgcggtttttctgggcttcctgggtgcggcggggtccacaatgggtgctgcgtctatgaccctgaccgtccaggctcgtaacctgttgtccggcattgtgcagcagcagtccaatctgttgcgtgcgattgaggcacagcaacatctgctgaagctgaccgtgtggggtatcaagcaactgcaggcacgagtgttggcggtcgagcgttatctgagggaccagcaactgctgggcatctggggctgctcgggcaagctgatctgcaccacgaacgtgccgtggggctcctcttggagcaatcgtagcttaagcgagatctgggactcaatgacctggttgcaatgggataaagagattagcagctatacccaaattatctatggcctgttggaggaaagccagaatcagcaagaaaagaacgagcaggatctgctggcgctggacaagtgggcgtccctgtggaactggtttgatatcagcaactggctgtggtacattaagatc

SEQ ID NO: 177 - protein, 173 aa, Artificial sequence
  Synthetic Construct
AVGIGAVFLGFLGAAGSTMGAASMTLTVQARNLLSGIVQQQSNLLRAIEAQQHLLKLTVWGIKQLQARVLAVERYLRDQQLLGIWGCSGKLICTTNVPWGSSWSNRSLSEIWDSMTWLQWDKEISSYTQIIYGLLEESQNQQEKNEQDLLALDKWASLWNWFDISNWLWYIKI

SEQ ID NO: 178 - DNA, 1386 bp, Artificial sequence
  synthetic
  CDS (1)..(1386): Linker (Flu)
ggtggccaaagcttacagggtcgtgctgttaacactacgttgaatggaggcgagcagtggatgcatgaaggtgcgatcgccaccgggaccgtgattaatgacaagggctggcaagttgttaaaccgggtaccgtagccacggacacagttgtcaataccggcgccgaaggtggtccggatgcagagaacggtgacaccggtcagttcgttcgtggagacgcggtccgtaccaccattaataaaaatggtcgtcagattgtacgtgccgaaggtaccgctaatacgaccgttgtctacgcggggggcgatcaaaccgtgcacggtcacgccctggacaccacgctgaacggtggttatcagtatgttcacaacggtggtacggctagcgatacagtggtgaactccgacggttggcaaattgttaagaacggcggtgtagccggcaacaccaccgttaaccaaaaaggcagattacaagttgatgcaggaggtacggcgaccaacgttaccctcaagcagggtggcgcactggttacttcaaccgcggcgacggtgaccggcatcaaccgcctgggcgcattctctgttgttgagggcaaggcagacaacgtggtcctggagaacggaggccgtctggatgtgctgacgggtcataccgcgaccaacacgcgggtggacgacggcggtacgctggatgtccgcaatggcggaaccgccaccaccgtgagtatgggtaacggtggtgtcttgctggcagatagcggcgcggcggtttcgggcacccgatctgacggtaaggctttctccatcggcggcgggcaggccgatgcactgatgctggaaaagggtagctccttcacccttaacgcgggtgacaccgcaacggacaccacagtgaacggcggtttgttcaccgctagaggtgggaccctcgcgggcaccacgaccctgaacaacggtgcgatcttgaccctgtccggtaaaaccgtgaataacgacaccttaaccatccgcgaaggtgacgctctgttgcaagggggctccctgacaggtaacgggagcgtggaaaaatcaggctctgggactctcactgttagcaacaccacccttacccagaaagcggtgaatctcaatgaagggacgttaaccttaaacgattcgaccgtgacgacagacgtgattgcgcagcgtggcaccgctctgaagctcaccggcagtacggtgctcaacggtgcgatcgatccgacaaacgtgactctggcttctggcgctacctggaatattccggataatgctactgtgcaatccgtggttgatgatttgagccatgcaggtcaaatccattttaccagcacccgcaccggcaaatttgttcccgcaacgttg

SEQ ID NO: 179 - protein, 462 aa, Artificial sequence
  Synthetic Construct
GGQSLQGRAVNTTLNGGEQWMHEGAIATGTVINDKGWQVVKPGTVATDTVVNTGAEGGPDAENGDTGQFVRGDAVRTTINKNGRQIVRAEGTANTTVVYAGGDQTVHGHALDTTLNGGYQYVHNGGTASDTVVNSDGWQIVKNGGVAGNTTVNQKGRLQVDAGGTATNVTLKQGGALVTSTAATVTGINRLGAFSVVEGKADNVVLENGGRLDVLTGHTATNTRVDDGGTLDVRNGGTATTVSMGNGGVLLADSGAAVSGTRSDGKAFSIGGGQADALMLEKGSSFTLNAGDTATDTTVNGGLFTARGGTLAGTTTLNNGAILTLSGKTVNNDTLTIREGDALLQGGSLTGNGSVEKSGSGTLTVSNTTLTQKAVNLNEGTLTLNDSTVTTDVIAQRGTALKLTGSTVLNGAIDPTNVTLASGATWNIPDNATVQSVVDDLSHAGQIHFTSTRTGKFVPATL

SEQ ID NO: 180 - DNA, 300 bp, Artificial sequence
  synthetic
  CDS (1)..(300): Autochaperone (Flu)
aaggttaagaacctgaacggtcagaatggcacgatttccttacgcgtgcgtcccgatatggcgcagaacaacgcggatcgtctggtgattgatggtggccgtgcaactggtaagaccatcctgaacctggttaacgcaggtaatagcgcgagcggactggcgaccagcggcaagggtatccaggttgttgaggcgattaacggcgcgaccaccgaagagggtgcgttcgtgcagggtaaccgcctgcaggccggcgcattcaactacagcctgaaccgtgacagcgatgaaagctggtac

SEQ ID NO: 181 - protein, 100 aa, Artificial sequence
  Synthetic Construct
KVKNLNGQNGTISLRVRPDMAQNNADRLVIDGGRATGKTILNLVNAGNSASGLATSGKGIQVVEAINGATTEEGAFVQGNRLQAGAFNYSLNRDSDESWY

SEQ ID NO: 182 - DNA, 1023 bp, Artificial sequence
  synthetic
  CDS (1)..(1023): beta-barrel (Flu)
ctgcgatccgagaacgcgtatcgcgcggaagtaccgctgtacgctagcatgctgacgcaggctatggattatgaccgcatcgtcgccggcagccgttcccatcagaccggtgtcaatggcgagaacaacagcgtccgcctgtctattcagggtggtcacctgggtcatgataataatggtggcatcgcacgtggtgccaccccggaaagctccggttcttatggtttcgttcgtttggagggcgacctgatgcgtactgaggttgcgggtatgagcgtgacggctggcgtgtacggtgcagcaggccacagctctgtcgacgtgaaagacgatgacggttctcgtgcgggcaccgtacgagatgacgccggttccctgggtggttacctgaatcttgtccacacctctagcggcttgtgggcagacattgtggcccaaggcacacgtcatagcatgaaagcaagttcggacaataatgattttcgtgcgcgcggttggggttggctgggttccttagagaccggtcttccgtttagcatcacggataacctgatgctggaaccgcagctccaatatacctggcagggcctgagcctagacgacggaaaagacaacgccggctacgttaaattcggccatggtagcgcccaacatgttcgcgctggctttcgtctgggtagccataatgacatgacctttggcgagggcacctcgtcaagagccccgctgcgcgatagcgcgaaacacagcgtctctgaactgccggttaactggtgggtccaaccgagcgtgatccgtactttctcgagccgtggtgatatgcgtgtaggcacaagcaccgcgggttctggaatgaccttcagcccgtcccaaaacggtacatccctcgacctgcaggcgggtttggaggcgcgcgttagagaaaatatcactctaggtgtgcaggcgggttacgcgcacagcgttagcggtagcagcgcggaagggtacaacggccaggcaaccctcaacgtgacgttctaa

SEQ ID NO: 183 - protein, 340 aa, Artificial sequence
  Synthetic Construct
LRSENAYRAEVPLYASMLTQAMDYDRIVAGSRSHQTGVNGENNSVRLSIQGGHLGHDNNGGIARGATPESSGSYGFVRLEGDLMRTEVAGMSVTAGVYGAAGHSSVDVKDDDGSRAGTVRDDAGSLGGYLNLVHTSSGLWADIVAQGTRHSMKASSDNNDFRARGWGWLGSLETGLPFSITDNLMLEPQLQYTWQGLSLDDGKDNAGYVKFGHGSAQHVRAGFRLGSHNDMTFGEGTSSRAPLRDSAKHSVSELPVNWWVQPSVIRTFSSRGDMRVGTSTAGSGMTFSPSQNGTSLDLQAGLEARVRENITLGVQAGYAHSVSGSSAEGYNGQATLNVTF

SEQ ID NO: 184 - DNA, 6662 bp, Artificial sequence
  synthetic
  misc_feature (1)..(6662): CSHCTR001-1-mU6 OSNEG20 plasmid [HSHCTR001-mU6]
gaattcgcggccctagcttgggatctttgtgaaggaaccttacttctgtggtgtgacataattggacaaactacctacagagatttaaagctctaaggtaaatataaaatttttaagtgtataatgtgttaaactagctgcatatgcttgctgcttgagagttttgcttactgagtatgatttatgaaaatattatacacaggagctagtgattctaattgtttgtgtattttagattcacagtcccaaggctcatttcaggcccctcagtcctcacagtctgttcatgatcataatcagccataccacatttgtagaggttttacttgctttaaaaaacctcccacacctccccctgaacctgaaacataaaatgaatgcaattgttgttgttaacttgtttattgcagcttataatggttacaaataaagcaatagcatcacaaatttcacaaataaagcatttttttcactgcattctagttgtggtttgtccaaactcatcaatgtatcttatcatgtctggatcgatcctgcattaatgaatcggccaacgcgcggggagaggcggtttgcgtattggctggcgtaatagcgaagaggcccgcaccgatcgcccttcccaacagttgcgcagcctgaatggcgaatgggacgcgccctgtagcggcgcattaagcgcggcgggtgtggtggttacgcgcagcgtgaccgctacacttgccagcgccctagcgcccgctcctttcgctttcttcccttcctttctcgccacgttcgccggctttctccgtcaagctctaaatcgggggctccctttagggttccgatttagtgctttacggcacctcgaccccaaaaaacttgattagggtgatggttcacgtagtgggccatcgccctgatagacggtttttcgccctttgacgttggagtccacgttctttaatagtggactcttgttccaaactggaacaacactcaaccctatctcggtctattcttttgatttataagggattttgccgatttcggcctattggttaaaaaatgagctgatttaacaaaaatttaacgcgaattttaacaaaatattaacgcttacaatttcctgatgcggtattttctccttacgcatctgtgcggtatttcacaccgcatacgcggatctgcgcagcaccatggcctgaaataacctctgaaagaggaacttggttaggaaccttctgaggcggaaagaaccagctgtggaatgtgtgtcagttagggtgtggaaagtccccaggctccccagcaggcagaagtatgcaaagcatgcatctcaattagtcagcaaccaggtgtggaaagtccccaggctccccagcaggcagaagtatgcaaagcatgcatctcaattagtcagcaaccatagtcccgcccctaactccgcccatcccgcccctaactccgcccagttccgcccattctccgccccatggctgactaattttttttatttatgcagaggccgaggccgcctcggcctctgagctattccagaagtagtgaggaggcttttttggaggcctaggcttttgcaaaaagcttgattcttctgacacaacagtctcgaacttaaggctagagccaccatgaccgagtacaagcccacggtgcgcctcgccacccgcgacgacgtccccagggccgtacgcaccctcgccgccgcgttcgccgactaccccgccacgcgccacaccgtcgatccggaccgccacatcgagcgggtcaccgagctgcaagaactcttcctcacgcgcgtcgggctcgacatcggcaaggtgtgggtcgcggacgacggcgccgcggtggcggtctggaccacgccggagagcgtcgaagcgggggcggtgttcgccgagatcggcccgcgcatggccgagttgagcggttcccggctggccgcgcagcaacagatggaaggcctcctggcgccgcaccggcccaaggagcccgcgtggttcctggccaccgtcggcgtctcgcccgaccaccagggcaagggtctgggcagcgccgtcgtgctccccggagtggaggcggccgagcgcgccggggtgcccgccttcctggagacctccgcgccccgcaacctccccttctacgagcggctcggcttcaccgtcaccgccgacgtcgaggtgcccgaaggaccgcgaacctggtgcatgacccgcaagcccggtgcctgagtttaacgaaatgaccgaccaagcgacgcccaacctgccatcacgatggccgcaataaaatatctttattttcattacatctgtgtgttggttttttgtgtggatcgatagcgataaggatcgatccgcgcatggtgcactctcagtacaatctgctctgatgccgcatagttaagccagccccgacacccgccaacacccgctgacgcgccctgacgggcttgtctgctcccggcatccgcttacagacaagctgtgaccgtctccgggagctgcatgtgtcagaggttttcaccgtcatcaccgaaacgcgcgagacgaaagggcctcgtgatacgcctatttttataggttaatgtcatgataataatggtttcttagacgtcaggtggcacttttcggggaaatgtgcgcggaacccctatttgtttatttttctaaatacattcagatatgtatccgctcatgagacaataaccctgataaatgcttcaataatattgaaaaaggaagagtatgagtattcaacatttccgtgtcgcccttattcccttttttgcggcattttgccttcctgtttttgctcacccagaaacgctggtgaaagtaaaagatgctgaagatcagttgggtgcacgagtgggttacatcgaactggatctcaacagcggtaagatccttgagagttttcgccccgaagaccgttttccaatgatgagcacttttaaagttctgctatgtggcgcggtattatcccgtattgacgccgggcaagagcaactcggtcgccgcatacactattctcagaatgacttggttgagtactcaccagtcacagaaaagcatcttacggatggcatgacagtaagagaattatgcagtgctgccataaccatgagtgataacactgcggccaacttacttctgacaacgatcggaggaccgaaggagctaaccgcttttttgcacaacatgggggatcatgtaactcgccttgatcgttgggaaccggagctgaatgaagccataccaaacgacgagcgtgacaccacgatgcctgtagcaatggcaacaacgttgcgcaaactattaactggcgaactacttactctagcttcccggcaacaattaatagactggatggaggcggataaagttgcaggaccacttctgcgctcggcccttccggctggctggtttattgctgataaatctggagccggtgagcgtgggtctcgcggtatcattgcagcactggggccagatggtaagccctcccgtatcgtagttatctacacgacggggagtcaggcaactatggatgaacgaaatagacagatcgctgagataggtgcctcactgattaagcattggtaactgtcagaccaagtttactcatatatactttagattgatttaaaacttcatttttaatttaaaaggatctaggtgaagatcctttttgataatctcatgaccaaaatcccttaacgtgagttttcgttccactgagcgtcagaccccgtagaaaagatcaaaggatcttcttgagatcctttttttctgcgcgtaatctgctgcttgcaaacaaaaaaaccaccgctaccagcggtggtttgtttgccggatcaagagctaccaactctttttccgaaggtaactggcttcagcagagcgcagataccaaatactgtccttctagtgtagccgtagttaggccaccacttcaagaactctgtagcaccgcctacatacctcgctctgctaatcctgttaccagtggctgctgccagtggcgataagtcgtgtcttaccgggttggactcaagacgatagttaccggataaggcgcagcggtcgggctgaacggggggttcgtgcacacagcccagcttggagcgaacgacctacaccgaactgagatacctacagcgtgagcattgagaaagcgccacgcttcccgaagggagaaaggcggacaggtatccggtaagcggcagggtcggaacaggagagcgcacgagggagcttccagggggaaacgcctggtatctttatagtcctgtcgggtttcgccacctctgacttgagcgtcgatttttgtgatgctcgtcaggggggcggagcctatggaaaaacgccagcaacgcggcctttttacggttcctggccttttgctggccttttgctcacatgttctttcctgcgttatcccctgattctgtggataaccgtattaccgcctttgagtgagctgataccgctcgccgcagccgaacgaccgagcgcagcgagtcagtgagcgaggaagcggaagagcgcccaatacgcaaaccgcctctccccgcgcgttggccgattcattaatgcagagcttgcaattcgcgcgtttttcaatattattgaagcatttatcagggttattgtctcatgagcggatacatatttgaatgtatttagaaaaataaacaaataggggttccgcgcacatttccccgaaaagtgccacctgacgtctaagaaaccattattatcatgacattaacctataaaaataggcgtagtacgaggccctttcactcattagatgcatgtcgttacataacttacggtaaatggcccgcctggctgaccgcccaacgacccccgcccattgacgtcaataatgacgtatgttcccatagtaacgccaatagggactttccattgacgtcaatgggtggagtatttacggtaaactgcccacttggcagtacatcaagtgtatcatatgccaagtacgccccctattgacgtcaatgacggtaaatggcccgcctggcattatgcccagtacatgaccttatgggactttcctacttggcagtacatctacgtattagtcatcgctattaccatggtgatgcggttttggcagtacatcaatgggcgtggatagcggtttgactcacggggatttccaagtctccaccccattgacgtcaatgggagtttgttttggcaccaaaatcaacgggactttccaaaatgtcgtaacaactccgccccattgacgcaaatgggcggtaggcgtgtacggtgggaggtctatataagcagagctcgtttagtgaaccgtcagatcgcctggagacgccatccacgctgttttgacctccatagaagacaccgggaccgatccagcctccggactctagcctaggccgcggaccatgtccggcttgaacgacatcttcgaggcccagaagatcgagtggcacgaggaaaagcttcgaaccatggtgagcaagggcgaggaggataacatggccatcatcaaggagttcatgcgcttcaaggtgcacatggagggctccgtgaacggccacgagttcgagatcgagggcgagggcgagggccgcccctacgagggcacccagaccgccaagctgaaggtgaccaagggtggccccctgcccttcgcctgggacatcctgtcccctcagttcatgtacggctccaaggcctacgtgaagcaccccgccgacatccccgactacttgaagctgtccttccccgagggcttcaagtgggagcgcgtgatgaacttcgaggacggcggcgtggtgaccgtgacccaggactcctccctgcaggacggcgagttcatctacaaggtgaagctgcgcggcaccaacttcccctccgacggccccgtaatgcagaagaagaccatgggctgggaggcctcctccgagcggatgtaccccgaggacggcgccctgaagggcgagatcaagcagaggctgaagctgaaggacggcggccactacgacgctgaggtcaagaccacctacaaggccaagaagcccgtgcagctgcccggcgcctacaacgtcaacatcaagttggacatcacctcccacaacgaggactacaccatcgtggaacagtacgaacgcgccgagggccgccactccaccggcggcatggacgagctgtacaagtagctcgagtgcggccccaaataatgattttattttgactgatagtgacctgttcgttgcaacaaattgatgagcaatgcttttttataatgccaactttgtacaaaaaagcaggctgcgagcgatcgctcgggcaggaagagggcctatttcccatgattccttcatatttgcatatacgatacaaggctgttagagagataattagaattaatttgactgtaaacacaaagatattagtacaaaatacgtgacgtagaaagtaataatttcttgggtagtttgcagttttaaaattatgttttaaaatggactatcatatgcttaccgtaacttgaaagtatttcgatttcttgggtttatatatcttgtggaaaggacgaggatccggcttcgcgccgtagtcttatcaagagtaagactacggcgcgaagcttttttg

SEQ ID NO: 185 - DNA, 241 bp, Artificial sequence
  synthetic
  promoter (1)..(241): U6 promoter
gagggcctatttcccatgattccttcatatttgcatatacgatacaaggctgttagagagataattagaattaatttgactgtaaacacaaagatattagtacaaaatacgtgacgtagaaagtaataatttcttgggtagtttgcagttttaaaattatgttttaaaatggactatcatatgcttaccgtaacttgaaagtatttcgatttcttgggtttatatatcttgtggaaaggac

SEQ ID NO: 186 - DNA, 58 bp, Artificial sequence
  synthetic
  misc_feature (1)..(58): scrambled shRNA(OSNEG20)
gatccggcttcgcgccgtagtcttatcaagagtaagactacggcgcgaagcttttttg

SEQ ID NO: 187 - DNA, 136 bp, Artificial sequence
  synthetic
  rep_origin (1)..(136): SV40 ori
atcccgcccctaactccgcccagttccgcccattctccgccccatggctgactaattttttttatttatgcagaggccgaggccgcctcggcctctgagctattccagaagtagtgaggaggcttttttggaggcc

SEQ ID NO: 188 - DNA, 600 bp, Artificial sequence
  synthetic
  CDS (1)..(600): PuroR gene
atgaccgagtacaagcccacggtgcgcctcgccacccgcgacgacgtccccagggccgtacgcaccctcgccgccgcgttcgccgactaccccgccacgcgccacaccgtcgatccggaccgccacatcgagcgggtcaccgagctgcaagaactcttcctcacgcgcgtcgggctcgacatcggcaaggtgtgggtcgcggacgacggcgccgcggtggcggtctggaccacgccggagagcgtcgaagcgggggcggtgttcgccgagatcggcccgcgcatggccgagttgagcggttcccggctggccgcgcagcaacagatggaaggcctcctggcgccgcaccggcccaaggagcccgcgtggttcctggccaccgtcggcgtctcgcccgaccaccagggcaagggtctgggcagcgccgtcgtgctccccggagtggaggcggccgagcgcgccggggtgcccgccttcctggagacctccgcgccccgcaacctccccttctacgagcggctcggcttcaccgtcaccgccgacgtcgaggtgcccgaaggaccgcgaacctggtgcatgacccgcaagcccggtgcctga

SEQ ID NO: 189 - protein, 199 aa, Artificial sequence
  Synthetic Construct
MTEYKPTVRLATRDDVPRAVRTLAAAFADYPATRHTVDPDRHIERVTELQELFLTRVGLDIGKVWVADDGAAVAVWTTPESVEAGAVFAEIGPRMAELSGSRLAAQQQMEGLLAPHRPKEPAWFLATVGVSPDHQGKGLGSAVVLPGVEAAERAGVPAFLETSAPRNLPFYERLGFTVTADVEVPEGPRTWCMTRKPGA

SEQ ID NO: 190 - DNA, 49 bp, Artificial sequence
  synthetic
  polyA_signal (1)..(49): poly(A) signal
aataaaatatctttattttcattacatctgtgtgttggttttttgtgtg

SEQ ID NO: 191 - DNA, 6666 bp, Artificial sequence
  synthetic
  misc_feature (1)..(6666): HSH02212-mU6-a-CD3D [pshRNA-CD3d] plasmid
gaattcgcggccctagcttgggatctttgtgaaggaaccttacttctgtggtgtgacataattggacaaactacctacagagatttaaagctctaaggtaaatataaaatttttaagtgtataatgtgttaaactagctgcatatgcttgctgcttgagagttttgcttactgagtatgatttatgaaaatattatacacaggagctagtgattctaattgtttgtgtattttagattcacagtcccaaggctcatttcaggcccctcagtcctcacagtctgttcatgatcataatcagccataccacatttgtagaggttttacttgctttaaaaaacctcccacacctccccctgaacctgaaacataaaatgaatgcaattgttgttgttaacttgtttattgcagcttataatggttacaaataaagcaatagcatcacaaatttcacaaataaagcatttttttcactgcattctagttgtggtttgtccaaactcatcaatgtatcttatcatgtctggatcgatcctgcattaatgaatcggccaacgcgcggggagaggcggtttgcgtattggctggcgtaatagcgaagaggcccgcaccgatcgcccttcccaacagttgcgcagcctgaatggcgaatgggacgcgccctgtagcggcgcattaagcgcggcgggtgtggtggttacgcgcagcgtgaccgctacacttgccagcgccctagcgcccgctcctttcgctttcttcccttcctttctcgccacgttcgccggctttctccgtcaagctctaaatcgggggctccctttagggttccgatttagtgctttacggcacctcgaccccaaaaaacttgattagggtgatggttcacgtagtgggccatcgccctgatagacggtttttcgccctttgacgttggagtccacgttctttaatagtggactcttgttccaaactggaacaacactcaaccctatctcggtctattcttttgatttataagggattttgccgatttcggcctattggttaaaaaatgagctgatttaacaaaaatttaacgcgaattttaacaaaatattaacgcttacaatttcctgatgcggtattttctccttacgcatctgtgcggtatttcacaccgcatacgcggatctgcgcagcaccatggcctgaaataacctctgaaagaggaacttggttaggaaccttctgaggcggaaagaaccagctgtggaatgtgtgtcagttagggtgtggaaagtccccaggctccccagcaggcagaagtatgcaaagcatgcatctcaattagtcagcaaccaggtgtggaaagtccccaggctccccagcaggcagaagtatgcaaagcatgcatctcaattagtcagcaaccatagtcccgcccctaactccgcccatcccgcccctaactccgcccagttccgcccattctccgccccatggctgactaattttttttatttatgcagaggccgaggccgcctcggcctctgagctattccagaagtagtgaggaggcttttttggaggcctaggcttttgcaaaaagcttgattcttctgacacaacagtctcgaacttaaggctagagccaccatgaccgagtacaagcccacggtgcgcctcgccacccgcgacgacgtccccagggccgtacgcaccctcgccgccgcgttcgccgactaccccgccacgcgccacaccgtcgatccggaccgccacatcgagcgggtcaccgagctgcaagaactcttcctcacgcgcgtcgggctcgacatcggcaaggtgtgggtcgcggacgacggcgccgcggtggcggtctggaccacgccggagagcgtcgaagcgggggcggtgttcgccgagatcggcccgcgcatggccgagttgagcggttcccggctggccgcgcagcaacagatggaaggcctcctggcgccgcaccggcccaaggagcccgcgtggttcctggccaccgtcggcgtctcgcccgaccaccagggcaagggtctgggcagcgccgtcgtgctccccggagtggaggcggccgagcgcgccggggtgcccgccttcctggagacctccgcgccccgcaacctccccttctacgagcggctcggcttcaccgtcaccgccgacgtcgaggtgcccgaaggaccgcgaacctggtgcatgacccgcaagcccggtgcctgagtttaacgaaatgaccgaccaagcgacgcccaacctgccatcacgatggccgcaataaaatatctttattttcattacatctgtgtgttggttttttgtgtggatcgatagcgataaggatcgatccgcgcatggtgcactctcagtacaatctgctctgatgccgcatagttaagccagccccgacacccgccaacacccgctgacgcgccctgacgggcttgtctgctcccggcatccgcttacagacaagctgtgaccgtctccgggagctgcatgtgtcagaggttttcaccgtcatcaccgaaacgcgcgagacgaaagggcctcgtgatacgcctatttttataggttaatgtcatgataataatggtttcttagacgtcaggtggcacttttcggggaaatgtgcgcggaacccctatttgtttatttttctaaatacattcagatatgtatccgctcatgagacaataaccctgataaatgcttcaataatattgaaaaaggaagagtatgagtattcaacatttccgtgtcgcccttattcccttttttgcggcattttgccttcctgtttttgctcacccagaaacgctggtgaaagtaaaagatgctgaagatcagttgggtgcacgagtgggttacatcgaactggatctcaacagcggtaagatccttgagagttttcgccccgaagaccgttttccaatgatgagcacttttaaagttctgctatgtggcgcggtattatcccgtattgacgccgggcaagagcaactcggtcgccgcatacactattctcagaatgacttggttgagtactcaccagtcacagaaaagcatcttacggatggcatgacagtaagagaattatgcagtgctgccataaccatgagtgataacactgcggccaacttacttctgacaacgatcggaggaccgaaggagctaaccgcttttttgcacaacatgggggatcatgtaactcgccttgatcgttgggaaccggagctgaatgaagccataccaaacgacgagcgtgacaccacgatgcctgtagcaatggcaacaacgttgcgcaaactattaactggcgaactacttactctagcttcccggcaacaattaatagactggatggaggcggataaagttgcaggaccacttctgcgctcggcccttccggctggctggtttattgctgataaatctggagccggtgagcgtgggtctcgcggtatcattgcagcactggggccagatggtaagccctcccgtatcgtagttatctacacgacggggagtcaggcaactatggatgaacgaaatagacagatcgctgagataggtgcctcactgattaagcattggtaactgtcagaccaagtttactcatatatactttagattgatttaaaacttcatttttaatttaaaaggatctaggtgaagatcctttttgataatctcatgaccaaaatcccttaacgtgagttttcgttccactgagcgtcagaccccgtagaaaagatcaaaggatcttcttgagatcctttttttctgcgcgtaatctgctgcttgcaaacaaaaaaaccaccgctaccagcggtggtttgtttgccggatcaagagctaccaactctttttccgaaggtaactggcttcagcagagcgcagataccaaatactgtccttctagtgtagccgtagttaggccaccacttcaagaactctgtagcaccgcctacatacctcgctctgctaatcctgttaccagtggctgctgccagtggcgataagtcgtgtcttaccgggttggactcaagacgatagttaccggataaggcgcagcggtcgggctgaacggggggttcgtgcacacagcccagcttggagcgaacgacctacaccgaactgagatacctacagcgtgagcattgagaaagcgccacgcttcccgaagggagaaaggcggacaggtatccggtaagcggcagggtcggaacaggagagcgcacgagggagcttccagggggaaacgcctggtatctttatagtcctgtcgggtttcgccacctctgacttgagcgtcgatttttgtgatgctcgtcaggggggcggagcctatggaaaaacgccagcaacgcggcctttttacggttcctggccttttgctggccttttgctcacatgttctttcctgcgttatcccctgattctgtggataaccgtattaccgcctttgagtgagctgataccgctcgccgcagccgaacgaccgagcgcagcgagtcagtgagcgaggaagcggaagagcgcccaatacgcaaaccgcctctccccgcgcgttggccgattcattaatgcagagcttgcaattcgcgcgtttttcaatattattgaagcatttatcagggttattgtctcatgagcggatacatatttgaatgtatttagaaaaataaacaaataggggttccgcgcacatttccccgaaaagtgccacctgacgtctaagaaaccattattatcatgacattaacctataaaaataggcgtagtacgaggccctttcactcattagatgcatgtcgttacataacttacggtaaatggcccgcctggctgaccgcccaacgacccccgcccattgacgtcaataatgacgtatgttcccatagtaacgccaatagggactttccattgacgtcaatgggtggagtatttacggtaaactgcccacttggcagtacatcaagtgtatcatatgccaagtacgccccctattgacgtcaatgacggtaaatggcccgcctggcattatgcccagtacatgaccttatgggactttcctacttggcagtacatctacgtattagtcatcgctattaccatggtgatgcggttttggcagtacatcaatgggcgtggatagcggtttgactcacggggatttccaagtctccaccccattgacgtcaatgggagtttgttttggcaccaaaatcaacgggactttccaaaatgtcgtaacaactccgccccattgacgcaaatgggcggtaggcgtgtacggtgggaggtctatataagcagagctcgtttagtgaaccgtcagatcgcctggagacgccatccacgctgttttgacctccatagaagacaccgggaccgatccagcctccggactctagcctaggccgcggaccatgtccggcttgaacgacatcttcgaggcccagaagatcgagtggcacgaggaaaagcttcgaaccatggtgagcaagggcgaggaggataacatggccatcatcaaggagttcatgcgcttcaaggtgcacatggagggctccgtgaacggccacgagttcgagatcgagggcgagggcgagggccgcccctacgagggcacccagaccgccaagctgaaggtgaccaagggtggccccctgcccttcgcctgggacatcctgtcccctcagttcatgtacggctccaaggcctacgtgaagcaccccgccgacatccccgactacttgaagctgtccttccccgagggcttcaagtgggagcgcgtgatgaacttcgaggacggcggcgtggtgaccgtgacccaggactcctccctgcaggacggcgagttcatctacaaggtgaagctgcgcggcaccaacttcccctccgacggccccgtaatgcagaagaagaccatgggctgggaggcctcctccgagcggatgtaccccgaggacggcgccctgaagggcgagatcaagcagaggctgaagctgaaggacggcggccactacgacgctgaggtcaagaccacctacaaggccaagaagcccgtgcagctgcccggcgcctacaacgtcaacatcaagttggacatcacctcccacaacgaggactacaccatcgtggaacagtacgaacgcgccgagggccgccactccaccggcggcatggacgagctgtacaagtagctcgagtgcggccccaaataatgattttattttgactgatagtgacctgttcgttgcaacaaattgatgagcaatgcttttttataatgccaactttgtacaaaaaagcaggctgcgagcgatcgctcgggcaggaagagggcctatttcccatgattccttcatatttgcatatacgatacaaggctgttagagagataattagaattaatttgactgtaaacacaaagatattagtacaaaatacgtgacgtagaaagtaataatttcttgggtagtttgcagttttaaaattatgttttaaaatggactatcatatgcttaccgtaacttgaaagtatttcgatttcttgggtttatatatcttgtggaaaggacgaggatccgggaacatagcacgtttctctctcaagaggagagaaacgtgctatgttccttttttg

SEQ ID NO: 192 - DNA, 62 bp, Artificial sequence
  synthetic
  misc_feature (1)..(62): shRNA CD3D
gatccgggaacatagcacgtttctctctcaagaggagagaaacgtgctatgttccttttttg

SEQ ID NO: 193 - DNA, 6492 bp, Artificial sequence
  synthetic
  misc_feature (1)..(6492): psiRNA-CD3d plasmid
gaattcgcggccctagcttctagcataaccccttggggcctctaaacgggtcttgaggggttttttggggatctttgtgaaggaaccttacttctgtggtgtgacataattggacaaactacctacagagatttaaagctctaaggtaaatataaaatttttaagtgtataatgtgttaaactagctgcatatgcttgctgcttgagagttttgcttactgagtatgatttatgaaaatattatacacaggagctagtgattctaattgtttgtgtattttagattcacagtcccaaggctcatttcaggcccctcagtcctcacagtctgttcatgatcataatcagccataccacatttgtagaggttttacttgctttaaaaaacctcccacacctccccctgaacctgaaacataaaatgaatgcaattgttgttgttaacttgtttattgcagcttataatggttacaaataaagcaatagcatcacaaatttcacaaataaagcatttttttcactgcattctagttgtggtttgtccaaactcatcaatgtatcttatcatgtctggatcgatcctgcattaatgaatcggccaacgcgcggggagaggcggtttgcgtattggctggcgtaatagcgaagaggcccgcaccgatcgcccttcccaacagttgcgcagcctgaatggcgaatgggacgcgccctgtagcggcgcattaagcgcggcgggtgtggtggttacgcgcagcgtgaccgctacacttgccagcgccctagcgcccgctcctttcgctttcttcccttcctttctcgccacgttcgccggctttctccgtcaagctctaaatcgggggctccctttagggttccgatttagtgctttacggcacctcgaccccaaaaaacttgattagggtgatggttcacgtagtgggccatcgccctgatagacggtttttcgccctttgacgttggagtccacgttctttaatagtggactcttgttccaaactggaacaacactcaaccctatctcggtctattcttttgatttataagggattttgccgatttcggcctattggttaaaaaatgagctgatttaacaaaaatttaacgcgaattttaacaaaatattaacgcttacaatttcctgatgcggtattttctccttacgcatctgtgcggtatttcacaccgcatacgcggatctgcgcagcaccatggcctgaaataacctctgaaagaggaacttggttaggaaccttctgaggcggaaagaaccagctgtggaatgtgtgtcagttagggtgtggaaagtccccaggctccccagcaggcagaagtatgcaaagcatgcatctcaattagtcagcaaccaggtgtggaaagtccccaggctccccagcaggcagaagtatgcaaagcatgcatctcaattagtcagcaaccatagtcccgcccctaactccgcccatcccgcccctaactccgcccagttccgcccattctccgccccatggctgactaattttttttatttatgcagaggccgaggccgcctcggcctctgagctattccagaagtagtgaggaggcttttttggaggcctaggcttttgcaaaaagcttgattcttctgacacaacagtctcgaacttaaggctagagccaccatgaccgagtacaagcccacggtgcgcctcgccacccgcgacgacgtccccagggccgtacgcaccctcgccgccgcgttcgccgactaccccgccacgcgccacaccgtcgatccggaccgccacatcgagcgggtcaccgagctgcaagaactcttcctcacgcgcgtcgggctcgacatcggcaaggtgtgggtcgcggacgacggcgccgcggtggcggtctggaccacgccggagagcgtcgaagcgggggcggtgttcgccgagatcggcccgcgcatggccgagttgagcggttcccggctggccgcgcagcaacagatggaaggcctcctggcgccgcaccggcccaaggagcccgcgtggttcctggccaccgtcggcgtctcgcccgaccaccagggcaagggtctgggcagcgccgtcgtgctccccggagtggaggcggccgagcgcgccggggtgcccgccttcctggagacctccgcgccccgcaacctccccttctacgagcggctcggcttcaccgtcaccgccgacgtcgaggtgcccgaaggaccgcgaacctggtgcatgacccgcaagcccggtgcctgagtttaacgaaatgaccgaccaagcgacgcccaacctgccatcacgatggccgcaataaaatatctttattttcattacatctgtgtgttggttttttgtgtggatcgatagcgataaggatcgatccgcgcatggtgcactctcagtacaatctgctctgatgccgcatagttaagccagccccgacacccgccaacacccgctgacgcgccctgacgggcttgtctgctcccggcatccgcttacagacaagctgtgaccgtctccgggagctgcatgtgtcagaggttttcaccgtcatcaccgaaacgcgcgagacgaaagggcctcgtgatacgcctatttttataggttaatgtcatgataataatggtttcttagacgtcaggtggcacttttcggggaaatgtgcgcggaacccctatttgtttatttttctaaatacattcagatatgtatccgctcatgagacaataaccctgataaatgcttcaataatattgaaaaaggaagagtatgagtattcaacatttccgtgtcgcccttattcccttttttgcggcattttgccttcctgtttttgctcacccagaaacgctggtgaaagtaaaagatgctgaagatcagttgggtgcacgagtgggttacatcgaactggatctcaacagcggtaagatccttgagagttttcgccccgaagaccgttttccaatgatgagcacttttaaagttctgctatgtggcgcggtattatcccgtattgacgccgggcaagagcaactcggtcgccgcatacactattctcagaatgacttggttgagtactcaccagtcacagaaaagcatcttacggatggcatgacagtaagagaattatgcagtgctgccataaccatgagtgataacactgcggccaacttacttctgacaacgatcggaggaccgaaggagctaaccgcttttttgcacaacatgggggatcatgtaactcgccttgatcgttgggaaccggagctgaatgaagccataccaaacgacgagcgtgacaccacgatgcctgtagcaatggcaacaacgttgcgcaaactattaactggcgaactacttactctagcttcccggcaacaattaatagactggatggaggcggataaagttgcaggaccacttctgcgctcggcccttccggctggctggtttattgctgataaatctggagccggtgagcgtgggtctcgcggtatcattgcagcactggggccagatggtaagccctcccgtatcgtagttatctacacgacggggagtcaggcaactatggatgaacgaaatagacagatcgctgagataggtgcctcactgattaagcattggtaactgtcagaccaagtttactcatatatactttagattgatttaaaacttcatttttaatttaaaaggatctaggtgaagatcctttttgataatctcatgaccaaaatcccttaacgtgagttttcgttccactgagcgtcagaccccgtagaaaagatcaaaggatcttcttgagatcctttttttctgcgcgtaatctgctgcttgcaaacaaaaaaaccaccgctaccagcggtggtttgtttgccggatcaagagctaccaactctttttccgaaggtaactggcttcagcagagcgcagataccaaatactgtccttctagtgtagccgtagttaggccaccacttcaagaactctgtagcaccgcctacatacctcgctctgctaatcctgttaccagtggctgctgccagtggcgataagtcgtgtcttaccgggttggactcaagacgatagttaccggataaggcgcagcggtcgggctgaacggggggttcgtgcacacagcccagcttggagcgaacgacctacaccgaactgagatacctacagcgtgagcattgagaaagcgccacgcttcccgaagggagaaaggcggacaggtatccggtaagcggcagggtcggaacaggagagcgcacgagggagcttccagggggaaacgcctggtatctttatagtcctgtcgggtttcgccacctctgacttgagcgtcgatttttgtgatgctcgtcaggggggcggagcctatggaaaaacgccagcaacgcggcctttttacggttcctggccttttgctggccttttgctcacatgttctttcctgcgttatcccctgattctgtggataaccgtattaccgcctttgagtgagctgataccgctcgccgcagccgaacgaccgagcgcagcgagtcagtgagcgaggaagcggaagagcgcccaatacgcaaaccgcctctccccgcgcgttggccgattcattaatgcagagcttgcaattcgcgcgtttttcaatattattgaagcatttatcagggttattgtctcatgagcggatacatatttgaatgtatttagaaaaataaacaaataggggttccgcgcacatttccccgaaaagtgccacctgacgtctaagaaaccattattatcatgacattaacctataaaaataggcgtagtacgaggccctttcactcattagatgcatgtcgttacataacttacggtaaatggcccgcctggctgaccgcccaacgacccccgcccattgacgtcaataatgacgtatgttcccatagtaacgccaatagggactttccattgacgtcaatgggtggagtatttacggtaaactgcccacttggcagtacatcaagtgtatcatatgccaagtacgccccctattgacgtcaatgacggtaaatggcccgcctggcattatgcccagtacatgaccttatgggactttcctacttggcagtacatctacgtattagtcatcgctattaccatggtgatgcggttttggcagtacatcaatgggcgtggatagcggtttgactcacggggatttccaagtctccaccccattgacgtcaatgggagtttgttttggcaccaaaatcaacgggactttccaaaatgtcgtaacaactccgccccattgacgcaaatgggcggtaggcgtgtacggtgggaggtctatataagcagagctcgtttagtgaaccgtcagatcgcctggagacgccatccacgctgttttgacctccatagaagacaccgggaccgatccagcctccggactctagcctaggccgcggaccatgtccggcttgaacgacatcttcgaggcccagaagatcgagtggcacgaggaaaagcttcgaaccatggtgagcaagggcgaggaggataacatggccatcatcaaggagttcatgcgcttcaaggtgcacatggagggctccgtgaacggccacgagttcgagatcgagggcgagggcgagggccgcccctacgagggcacccagaccgccaagctgaaggtgaccaagggtggccccctgcccttcgcctgggacatcctgtcccctcagttcatgtacggctccaaggcctacgtgaagcaccccgccgacatccccgactacttgaagctgtccttccccgagggcttcaagtgggagcgcgtgatgaacttcgaggacggcggcgtggtgaccgtgacccaggactcctccctgcaggacggcgagttcatctacaaggtgaagctgcgcggcaccaacttcccctccgacggccccgtaatgcagaagaagaccatgggctgggaggcctcctccgagcggatgtaccccgaggacggcgccctgaagggcgagatcaagcagaggctgaagctgaaggacggcggccactacgacgctgaggtcaagaccacctacaaggccaagaagcccgtgcagctgcccggcgcctacaacgtcaacatcaagttggacatcacctcccacaacgaggactacaccatcgtggaacagtacgaacgcgccgagggccgccactccaccggcggcatggacgagctgtacaagtagctcgagtgcggccccaaataatgattttattttgactgatagtgacctgttcgttgcaacaaattgatgagcaatgcttttttataatgccaactttgtacaaaaaagcaggctgcgagcgatcgctcgggcaggaataatacgactcactatagggaggatccgggaacatagcacgtttctctctcaagaggagagaaacgtgctatgttccttttttg

SEQ ID NO: 194 - DNA, 6909 bp, Artificial sequence
  synthetic
  misc_feature (1)..(6909): pCOLA-ipaBC-inaK plasmid
ttgacggctagctcagtcctaggtacagtgctagcgcaaagctaaaaaaaatcctgaaactaaggaggtcattatgactctcgacaaggcgttggtgctgcgtacctgtgcaaataacatggccgatcactgcggccttatatggcccgcgtccggcacggtggaatccagatactggcagtcaaccaggcggcatgagaatggtctggtcggtttactgtggggcgctggaaccagcgcttttctaagcgtgcatgccgatgctcgatggattgtctgtgaagttgccgttgcagacatcatcagtctggaagagccgggaatggtcaagtttccgcgggccgaggtggttcatgtcggcgacaggatcagcgcgtcacacttcatttcggcacgtcaggccgaccctgcgtcaacgtcaacgtcaacgtcaacgtcaacgttaacgccaatgcctacggccatacccacgcccatgcctgcggtagcaagtgtcacgttaccggtggccgaacaggcccgtcatgaagtgttcgatgtcgcgtcggtcagcgcggctgccgccccagtaaacaccctgccggtgacgacgccgcagaatttgcagaccttcagactctgggacgggaagaggtacaggcaactggtcgccagaacgggtgagaacggtgttgaggccgacataccgtattacgtgaacgaagatgacgatattgtcgataaacccgacgaggacgatgactggatagaggtaaagatgcataatgtaagcaccacaaccactggttttcctcttgccaaaatattgacttccactgagcttggagacaatactatccaagctgcaaatgatgcagctaacaaattattttctcttacaattgctgatcttactgctaaccaaaatattaatacaactaatgcacactcaacttcaaatatattaatccctgaacttaaagcaccaaagtcattaaatgcaagttcccaactaacgcttttaattggaaaccttattcaaatactcggtgaaaaatctttaactgcattaacaaataaaattactgcttggaagtcccagcaacaggcaagacagcaaaaaaacctagaattctccgataaaattaacactcttctatctgaaactgaaggactaaccagagactatgaaaaacaaattaataaactaaaaaacgcagattctaaaataaaagacctagaaaataaaattaaccaaattcaaacaagattatccgaactcgatccagagtcaccagaaaagaaaaaattaagccgggaagaaatacaactcactatcaaaaaagacgcagcagttaaagacaggacattgattgagcagaaaaccctgtcaattcatagcaaacttacagataaatcaatgcaactcgaaaaagaaatagactctttttctgcattttcaaacacagcatctgctgaacagctatcaacccagcagaaatcattaaccggacttgccagtgttactcaattgatggcaacctttattcaactagttggaaaaaataatgaagaatctttaaaaaatgatctggctctattccagtctctccaagaatcaagaaaaactgaaatggagagaaaatctgatgagtatgctgctgaagtacgtaaagcagaagaactcaacagagtaatgggttgtgttgggaaaatacttggggcacttttaactatcgttagtgttgttgcagcagctttttctggaggagcctctctagcactggcagctgttggtttagctcttatggttacggatgctatagtacaagcagcgaccggcaattccttcatggaacaagccctgaatccgatcatgaaagcagtcattgaacccttaatcaaactcctttcagatgcatttacaaaaatgctcgaaggcttgggcgtcgactcgaaaaaagccaaaatgattggctctattctgggggcaatcgcaggcgctcttgtcctagttgcagcagtcgttctcgtagccactgttggtaaacaggcagcagcaaaacttgcagaaaatattggcaaaataataggtaaaaccctcacagaccttataccaaagtttctcaagaatttttcttctcaactggacgatttaatcactaatgctgttgccagattaaataaatttcttggtgcagcgggtgatgaagtaatatccaaacaaattatttccacccatttaaaccaagcagttttattaggagaaagtgttaactctgccacacaagcgggaggaagtgtcgcttctgctgttttccagaacagcgcgtcgacaaatctagcagacctgacattatcgaaatatcaagttgaacaactgtcaaaatatatcagtgaagcaatagaaaaattcggccaattgcaggaagtaattgcagatctattagcctcaatgtccaactctcaggctaatagaactgatgttgcaaaagcaattttgcaacaaactactgctggtggtggcggcgggtcgggtggtggcggcagcatggaaattcaaaacacaaaaccaacccagactttatatacagatatatccacaaaacaaactcaaagttcttccgaaacacaaaaatcacaaaattatcagcagattgcagcgcatattccacttaatgtcggtaaaaatcccgtattaacaaccacattaaatgatgatcaacttttaaagttatcagagcaggttcagcatgattcagaaatcattgctcgccttactgacaaaaagatgaaagatctttcagagatgagtcacacccttactccagagaacactctggatatttccagtctttcttctaatgctgtttctttaattattagtgtagccgttctactttctgctctccgcactgcagaaactaaattgggctctcaattgtcattgattgcgttcgatgctacaaaatcagctgcagagaacattgttcggcaaggcctggcagccctatcatcaagcattactggagcagtcacacaagtaggtataacgggtatcggtgccaaaaaaacgcattcagggattagcgaccaaaaaggagccttaagaaagaaccttgccactgctcaatctcttgaaaaagagcttgcaggttctaaattagggttaaataaacaaatagatacaaatatcacctcaccacaaactaactctagcacaaaatttttaggtaaaaataaactggcgccagataatatatccctgtcaactgaacataaaacttctcttagttctcccgatatttctttgcaggataaaattgacacccagagaagaacttacgagctcaataccctttctgcgcagcaaaaacaaaacattggccgtgcaacaatggaaacatcagccgttgctggtaatatatccacatcaggagggcgttatgcatctgctcttgaagaagaagaacaactaatcagtcaggccagcagtaaacaagcagaggaagcatcccaagtatctaaagaagcatcccaagcgacaaatcaattaatacaaaaattattgaatataattgacagcatcaaccaatcaaagaattcggcagccagtcagattgctggtaacattcgagcttaagaggcatcaaataaaacgaaaggctcagtcgaaagactgggcctttcgttttatctgttgtttgtcggtgaacgctctcctgagtaggacaaatctgaaacctcaggcatttgagaagcacacggtcacactgcttccggtagtcaataaaccggtaaaccagcaatagacataagcggctatttaacgaccctgccctgaaccgacgacaagctgacgaccgggtctccgcaagtggcacttttcggggaaatgtgcgcggaacccctatttgtttatttttctaaatacattcaaatatgtatccgctcatgaattaattcttagaaaaactcatcgagcatcaaatgaaactgcaatttattcatatcaggattatcaataccatatttttgaaaaagccgtttctgtaatgaaggagaaaactcaccgaggcagttccataggatggcaagatcctggtatcggtctgcgattccgactcgtccaacatcaatacaacctattaatttcccctcgtcaaaaataaggttatcaagtgagaaatcaccatgagtgacgactgaatccggtgagaatggcaaaagtttatgcatttctttccagacttgttcaacaggccagccattacgctcgtcatcaaaatcactcgcatcaaccaaaccgttattcattcgtgattgcgcctgagcgagacgaaatacgcggtcgctgttaaaaggacaattacaaacaggaatcgaatgcaaccggcgcaggaacactgccagcgcatcaacaatattttcacctgaatcaggatattcttctaatacctggaatgctgttttcccggggatcgcagtggtgagtaaccatgcatcatcaggagtacggataaaatgcttgatggtcggaagaggcataaattccgtcagccagtttagtctgaccatctcatctgtaacatcattggcaacgctacctttgccatgtttcagaaacaactctggcgcatcgggcttcccatacaatcgatagattgtcgcacctgattgcccgacattatcgcgagcccatttatacccatataaatcagcatccatgttggaatttaatcgcggcctagagcaagacgtttcccgttgaatatggctcatactcttcctttttcaatattattgaagcatttatcagggttattgtctcatgagcggatacatatttgaatgtatttagaaaaataaacaaataggcatgctagcgcagaaacgtcctagaagatgccaggaggatacttagcagagagacaataaggccggagcgaagccgtttttccataggctccgcccccctgacgaacatcacgaaatctgacgctcaaatcagtggtggcgaaacccgacaggactataaagataccaggcgtttccccctgatggctccctcttgcgctctcctgttcccgtcctgcggcgtccgtgttgtggtggaggctttacccaaatcaccacgtcccgttccgtgtagacagttcgctccaagctgggctgtgtgcaagaaccccccgttcagcccgactgctgcgccttatccggtaactatcatcttgagtccaacccggaaagacacgacaaaacgccactggcagcagccattggtaactgagaattagtggatttagatatcgagagtcttgaagtggtggcctaacagaggctacactgaaaggacagtatttggtatctgcgctccactaaagccagttaccaggttaagcagttccccaactgacttaaccttcgatcaaaccgcctccccaggcggttttttcgtttacagagcaggagattacgacgatcgtaaaaggatctcaagaagatcctttacggattcccgacaccatcactctagatttcagtgcaatttatctcttcaaatgtagcacctgaagtcagccccatacgatataagttgtaattctcatgttagtcatgccccgcgcccaccggaaggagctgactgggttgaaggctctcaagggcatcggtcgagatcccggtgcctaatgagtgagctaacttacattaattgcgttgcgctcactgcccgctttccagtcgggaaacctgtcgtgccagctgcattaatgaatcggccaacgcgcggggagaggcggtttgcgtattgggcgccagggtggtttttcttttcaccagtgagacgggcaacagctgattgcccttcaccgcctggccctgagagagttgcagcaagcggtccacgctggtttgccccagcaggcgaaaatcctgtttgatggtggttaacggcgggatataacatgagctgtcttcggtatcgtcgtatcccactaccgagatgtccgcaccaacgcgcagcccggactcggtaatggcgcgcattgcgcccagcgccatctgatcgttggcaaccagcatcgcagtgggaacgatgccctcattcagcatttgcatggtttgttgaaaaccggacatggcactccagtcgccttcccgttccgctatcggctgaatttgattgcgagtgagatatttatgccagccagccagacgcagacgcgccgagacagaacttaatgggcccgctaacagcgcgatttgctggtgacccaatgcgaccagatgctccacgcccagtcgcgtaccgtcttcatgggagaaaataatactgttgatgggtgtctggtcagagacatcaagaaataacgccggaacattagtgcaggcagcttccacagcaatggcatcctggtcatccagcggatagttaatgatcagcccactgacgcgttgcgcgagaagattgtgcaccgccgctttacaggcttcgacgccgcttcgttctaccatcgacaccaccacgctggcacccagttgatcggcgcgagatttaatcgccgcgacaatttgcgacggcgcgtgcagggccagactggaggtggcaacgccaatcagcaacgactgtttgcccgccagttgttgtgccacgcggttgggaatgtaattcagctccgccatcgccgcttccactttttcccgcgttttcgcagaaacgtggctggcctggttcaccacgcgggaaacggtctgataagagacaccggcatactctgcgacatcgtataacgttactggtttcacattcaccaccctgaattgactctcttccgggcgctatcatgccataccgcgaaaggttttgcgccattcgatggtgtccgggatctcgacgctctcccttatgcgactcctgcattaggaaat

SEQ ID NO: 195 - DNA, 684 bp, Artificial sequence
  synthetic
  CDS (1)..(684): inaK gene
atgactctcgacaaggcgttggtgctgcgtacctgtgcaaataacatggccgatcactgcggccttatatggcccgcgtccggcacggtggaatccagatactggcagtcaaccaggcggcatgagaatggtctggtcggtttactgtggggcgctggaaccagcgcttttctaagcgtgcatgccgatgctcgatggattgtctgtgaagttgccgttgcagacatcatcagtctggaagagccgggaatggtcaagtttccgcgggccgaggtggttcatgtcggcgacaggatcagcgcgtcacacttcatttcggcacgtcaggccgaccctgcgtcaacgtcaacgtcaacgtcaacgtcaacgttaacgccaatgcctacggccatacccacgcccatgcctgcggtagcaagtgtcacgttaccggtggccgaacaggcccgtcatgaagtgttcgatgtcgcgtcggtcagcgcggctgccgccccagtaaacaccctgccggtgacgacgccgcagaatttgcagaccttcagactctgggacgggaagaggtacaggcaactggtcgccagaacgggtgagaacggtgttgaggccgacataccgtattacgtgaacgaagatgacgatattgtcgataaacccgacgaggacgatgactggatagaggtaaag

SEQ ID NO: 196 - protein, 228 aa, Artificial sequence
  Synthetic Construct
MTLDKALVLRTCANNMADHCGLIWPASGTVESRYWQSTRRHENGLVGLLWGAGTSAFLSVHADARWIVCEVAVADIISLEEPGMVKFPRAEVVHVGDRISASHFISARQADPASTSTSTSTSTLTPMPTAIPTPMPAVASVTLPVAEQARHEVFDVASVSAAAAPVNTLPVTTPQNLQTFRLWDGKRYRQLVARTGENGVEADIPYYVNEDDDIVDKPDEDDDWIEVK

SEQ ID NO: 197 - DNA, 7219 bp, Artificial sequence
  synthetic
  misc_feature (1)..(7219): pCas9-gRNA-hPD1 plasmid
gaattctaaagatctttgacagctagctcagtcctaggtataatactagtatgtggaagtcacgcccgttgttttagagctagaaatagcaagttaaaataaggctagtccgttatcaacttgaaaaagtggcaccgagtcggtgctttttttgaagcttgggcccgaacaaaaactcatctcagaagaggatctgaatagcgccgtcgaccatcatcatcatcatcattgagtttaaacggtctccagcttggctgttttggcggatgagagaagattttcagcctgatacagattaaatcagaacgcagaagcggtctgataaaacagaatttgcctggcggcagtagcgcggtggtcccacctgaccccatgccgaactcagaagtgaaacgccgtagcgccgatggtagtgtggggtctccccatgcgagagtagggaactgccaggcatcaaataaaacgaaaggctcagtcgaaagactgggcctttcgttttatctgttgtttgtcggtgaactggatccttactcgagtctagactgcagttgaattcgcggccgcttctagagtttacggctagctcagtcctaggtactatgctagctatcagcaggacgcactgaccaggaggtacaatcaatggactataaggaccacgacggagactacaaggatcatgatattgattacaaagacgatgacgataagatggccccaaagaagaagcggaaggtcggtatccacggagtcccagcagccgataagaaatactcaataggcttagatatcggcacaaatagcgtcggatgggcggtgatcactgatgaatataaggttccgtctaaaaagttcaaggttctgggaaatacagaccgccacagtatcaaaaaaaatcttataggggctcttttatttgacagtggagagacagcggaagcgactcgtctcaaacggacagctcgtagaaggtatacacgtcggaagaatcgtatttgttatctacaggagattttttcaaatgagatggcgaaagtagatgatagtttctttcatcgacttgaagagtcttttttggtggaagaagacaagaagcatgaacgtcatcctatttttggaaatatagtagatgaagttgcttatcatgagaaatatccaactatctatcatctgcgaaaaaaattggtagattctactgataaagcggatttgcgcttaatctatttggccttagcgcatatgattaagtttcgtggtcattttttgattgagggagatttaaatcctgataatagtgatgtggacaaactatttatccagttggtacaaacctacaatcaattatttgaagaaaaccctattaacgcaagtggagtagatgctaaagcgattctttctgcacgattgagtaaatcaagacgattagaaaatctcattgctcagctccccggtgagaagaaaaatggcttatttgggaatctcattgctttgtcattgggtttgacccctaattttaaatcaaattttgatttggcagaagatgctaaattacagctttcaaaagatacttacgatgatgatttagataatttattggcgcaaattggagatcaatatgctgatttgtttttggcagctaagaatttatcagatgctattttactttcagatatcctaagagtaaatactgaaataactaaggctcccctatcagcttcaatgattaaacgctacgatgaacatcatcaagacttgactcttttaaaagctttagttcgacaacaacttccagaaaagtataaagaaatcttttttgatcaatcaaaaaacggatatgcaggttatattgatgggggagctagccaagaagaattttataaatttatcaaaccaattttagaaaaaatggatggtactgaggaattattggtgaaactaaatcgtgaagatttgctgcgcaagcaacggacctttgacaacggctctattccccatcaaattcacttgggtgagctgcatgctattttgagaagacaagaagacttttatccatttttaaaagacaatcgtgagaagattgaaaaaatcttgacttttcgaattccttattatgttggtccattggcgcgtggcaatagtcgttttgcatggatgactcggaagtctgaagaaacaattaccccatggaattttgaagaagttgtcgataaaggtgcttcagctcaatcatttattgaacgcatgacaaactttgataaaaatcttccaaatgaaaaagtactaccaaaacatagtttgctttatgagtattttacggtttataacgaattgacaaaggtcaaatatgttactgaaggaatgcgaaaaccagcatttctttcaggtgaacagaagaaagccattgttgatttactcttcaaaacaaatcgaaaagtaaccgttaagcaattaaaagaagattatttcaaaaaaatagaatgttttgatagtgttgaaatttcaggagttgaagatagatttaatgcttcattaggtacctaccatgatttgctaaaaattattaaagataaagattttttggataatgaagaaaatgaagatatcttagaggatattgttttaacattgaccttatttgaagatagggagatgattgaggaaagacttaaaacatatgctcacctctttgatgataaggtgatgaaacagcttaaacgtcgccgttatactggttggggacgtttgtctcgaaaattgattaatggtattagggataagcaatctggcaaaacaatattagattttttgaaatcagatggttttgccaatcgcaattttatgcagctgatccatgatgatagtttgacatttaaagaagacattcaaaaagcacaagtgtctggacaaggcgatagtttacatgaacatattgcaaatttagctggtagccctgctattaaaaaaggtattttacagactgtaaaagttgttgatgaattggtcaaagtaatggggcggcataagccagaaaatatcgttattgaaatggcacgtgaaaatcagacaactcaaaagggccagaaaaattcgcgagagcgtatgaaacgaatcgaagaaggtatcaaagaattaggaagtcagattcttaaagagcatcctgttgaaaatactcaattgcaaaatgaaaagctctatctctattatctccaaaatggaagagacatgtatgtggaccaagaattagatattaatcgtttaagtgattatgatgtcgatcacattgttccacaaagtttccttaaagacgattcaatagacaataaggtcttaacgcgttctgataaaaatcgtggtaaatcggataacgttccaagtgaagaagtagtcaaaaagatgaaaaactattggagacaacttctaaacgccaagttaatcactcaacgtaagtttgataatttaacgaaagctgaacgtggaggtttgagtgaacttgataaagctggttttatcaaacgccaattggttgaaactcgccaaatcactaagcatgtggcacaaattttggatagtcgcatgaatactaaatacgatgaaaatgataaacttattcgagaggttaaagtgattaccttaaaatctaaattagtttctgacttccgaaaagatttccaattctataaagtacgtgagattaacaattaccatcatgcccatgatgcgtatctaaatgccgtcgttggaactgctttgattaagaaatatccaaaacttgaatcggagtttgtctatggtgattataaagtttatgatgttcgtaaaatgattgctaagtctgagcaagaaataggcaaagcaaccgcaaaatatttcttttactctaatatcatgaacttcttcaaaacagaaattacacttgcaaatggagagattcgcaaacgccctctaatcgaaactaatggggaaactggagaaattgtctgggataaagggcgagattttgccacagtgcgcaaagtattgtccatgccccaagtcaatattgtcaagaaaacagaagtacagacaggcggattctccaaggagtcaattttaccaaaaagaaattcggacaagcttattgctcgtaaaaaagactgggatccaaaaaaatatggtggttttgatagtccaacggtagcttattcagtcctagtggttgctaaggtggaaaaagggaaatcgaagaagttaaaatccgttaaagagttactagggatcacaattatggaaagaagttcctttgaaaaaaatccgattgactttttagaagctaaaggatataaggaagttaaaaaagacttaatcattaaactacctaaatatagtctttttgagttagaaaacggtcgtaaacggatgctggctagtgccggagaattacaaaaaggaaatgagctggctctgccaagcaaatatgtgaattttttatatttagctagtcattatgaaaagttgaagggtagtccagaagataacgaacaaaaacaattgtttgtggagcagcataagcattatttagatgagattattgagcaaatcagtgaattttctaagcgtgttattttagcagatgccaatttagataaagttcttagtgcatataacaaacatagagacaaaccaatacgtgaacaagcagaaaatattattcatttatttacgttgacgaatcttggagctcccgctgcttttaaatattttgatacaacaattgatcgtaaacgatatacgtctacaaaagaagttttagatgccactcttatccatcaatccatcactggtctttatgaaacacgcattgatttgagtcagctaggaggtgacaaaaggccggcggccacgaaaaaggccggccaggcaaaaaagaaaaaggaattcggcagtggagaattctaactgttgtttgtcggtgaactggatccttactcgagtctagactgcaggcttcctcgctcactgactcgctgcgctcggtcgttcggctgcggcgagcggtatcagctcactcaaaggcggtaatacggttatccacagaatcaggggataacgcaggaaagaacatgtgagcaaaaggccagcaaaaggccaggaaccgtaaaaaggccgcgttgctggcgtttttccataggctccgcccccctgacgagcatcacaaaaatcgacgctcaagtcagaggtggcgaaacccgacaggactataaagataccaggcgtttccccctggaagctccctcgtgcgctctcctgttccgaccctgccgcttaccggatacctgtccgcctttctcccttcgggaagcgtggcgctttctcatagctcacgctgtaggtatctcagttcggtgtaggtcgttcgctccaagctgggctgtgtgcacgaaccccccgttcagcccgaccgctgcgccttatccggtaactatcgtcttgagtccaacccggtaagacacgacttatcgccactggcagcagccactggtaacaggattagcagagcgaggtatgtaggcggtgctacagagttcttgaagtggtggcctaactacggctacactagaagaacagtatttggtatctgcgctctgctgaagccagttaccttcggaaaaagagttggtagctcttgatccggcaaacaaaccaccgctggtagcggtggtttttttgtttgcaagcagcagattacgcgcagaaaaaaaggatctcaagaagatcctttgatcttttctacggggtctgacgctcagtggaacgaaaactcacgttaagggattttggtcatgagattatcaaaaaggatcttcacctagatccttttaaattaaaaatgaagttttaaatcaatctaaagtatatatgagtaaacttggtctgacagttaccaatgcttaatcagtgaggcacctatctcagcgatctgtctatttcgttcatccatagttgcctgactccccgtcgtgtagataactacgatacgggagggcttaccatctggccccagtgctgcaatgataccgcgagacccacgctcaccggctccagatttatcagcaataaaccagccagccggaagggccgagcgcagaagtggtcctgcaactttatccgcctccatccagtctattaattgttgccgggaagctagagtaagtagttcgccagttaatagtttgcgcaacgttgttgccattgctacaggcatcgtggtgtcacgctcgtcgtttggtatggcttcattcagctccggttcccaacgatcaaggcgagttacatgatcccccatgttgtgcaaaaaagcggttagctccttcggtcctccgatcgttgtcagaagtaagttggccgcagtgttatcactcatggttatggcagcactgcataattctcttactgtcatgccatccgtaagatgcttttctgtgactggtgagtactcaaccaagtcattctgagaatagtgtatgcggcgaccgagttgctcttgcccggcgtcaatacgggataataccgcgccacatagcagaactttaaaagtgctcatcattggaaaacgttcttcggggcgaaaactctcaaggatcttaccgctgttgagatccagttcgatgtaacccactcgtgcacccaactgatcttcagcatcttttactttcaccagcgtttctgggtgagcaaaaacaggaaggcaaaatgccgcaaaaaagggaataagggcgacacggaaatgttgaatactcatactcttcctttttcaatattattgaagcatttatcagggttattgtctcatgagcggatacatatttgaatgtatttagaaaaataaacaaataggggttccgcggaagatcctttgatcttttctacggggtctgacgctcagtggaacgaaaactcacgttaagggattttggtcatgagattatcaaaaaggatcttcacctagatccttttaaattaaaaatgaagttttaaatcaatctaaagtatatatgagtaaacttggtctgacagaaaatttagcttccttagctcctgaaaatctcgataactcaaaaaatacgcccggtagtgatcaggggttccgcgcacatttccccgaaaagtgccacctgacgtctaagaaaccattattatcatgacattaacctataaaaataggcgtatcacgaggcagatg

SEQ ID NO: 198 - DNA, 20 bp, Artificial sequence
  synthetic
  misc_feature (1)..(20): gRNA for PDCD1
atgtggaagtcacgcccgtt

SEQ ID NO: 199 - DNA, 35 bp, Artificial sequence
  synthetic
  promoter (1)..(35): J23105 promoter
tttacggctagctcagtcctaggtactatgctagc

SEQ ID NO: 200 - DNA, 66 bp, Artificial sequence
  synthetic
  CDS (1)..(66): 3xFLAG
gactataaggaccacgacggagactacaaggatcatgatattgattacaaagacgatgacgataag

SEQ ID NO: 201 - protein, 22 aa, Artificial sequence
  Synthetic Construct
DYKDHDGDYKDHDIDYKDDDDK

SEQ ID NO: 202 - DNA, 21 bp, Artificial sequence
  synthetic
  CDS (1)..(21): SV40 NLS
ccaaagaagaagcggaaggtc

SEQ ID NO: 203 - protein, 7 aa, Artificial sequence
  Synthetic Construct
PKKKRKV

SEQ ID NO: 204 - DNA, 48 bp, Artificial sequence
  synthetic
  CDS (1)..(48): nucleoplasmin NLS
aaaaggccggcggccacgaaaaaggccggccaggcaaaaaagaaaaag

SEQ ID NO: 205 - protein, 16 aa, Artificial sequence
  Synthetic Construct
KRPAATKKAGQAKKKK

SEQ ID NO: 206 - DNA, 9282 bp, Artificial sequence
  synthetic
  misc_feature (1)..(9282): pCas9-GFP-gRNA-hPD1 plasmid
gagggcctatttcccatgattccttcatatttgcatatacgatacaaggctgttagagagataattggaattaatttgactgtaaacacaaagatattagtacaaaatacgtgacgtagaaagtaataatttcttgggtagtttgcagttttaaaattatgttttaaaatggactatcatatgcttaccgtaacttgaaagtatttcgatttcttggctttatatatcttgtggaaaggacatgtggaagtcacgcccgttgttttagagctagaaatagcaagttaaaataaggctagtccgttatcaacttgaaaaagtggcaccgagtcggtgcttttttgttttagagctagaaatagcaagttaaaataaggctagtccgtttttagcgcgtgcgccaattctgcagacaaatggctctagaggtacccgttacataacttacggtaaatggcccgcctggctgaccgcccaacgacccccgcccattgacgtcaatagtaacgccaatagggactttccattgacgtcaatgggtggagtatttacggtaaactgcccacttggcagtacatcaagtgtatcatatgccaagtacgccccctattgacgtcaatgacggtaaatggcccgcctggcattgtgcccagtacatgaccttatgggactttcctacttggcagtacatctacgtattagtcatcgctattaccatggtcgaggtgagccccacgttctgcttcactctccccatctcccccccctccccacccccaattttgtatttatttattttttaattattttgtgcagcgatgggggcggggggggggggggggcgcgcgccgggggggggggggggggggggggggggggggggggcgaggcggagaggtgcggcggcagccaatcagagcggcgcgctccgaaagtttccttttatggcgaggcggcggcggcggcggccctataaaaagcgaagcgcgcggcgggcgggagtcgctgcgcgctgccttcgccccgtgccccgctccgccgccgcctcgcgccgcccgccccggctctgactgaccgcgttactcccacaggtgagcgggcgggacggcccttctcctccgggctgtaattagctgagcaagaggtaagggtttaagggatggttggttggtggggtattaatgtttaattacctggagcacctgcctgaaatcactttttttcaggttggaccggtgccaccatggactataaggaccacgacggagactacaaggatcatgatattgattacaaagacgatgacgataagatggccccaaagaagaagcggaaggtcggtatccacggagtcccagcagccgacaagaagtacagcatcggcctggacatcggcaccaactctgtgggctgggccgtgatcaccgacgagtacaaggtgcccagcaagaaattcaaggtgctgggcaacaccgaccggcacagcatcaagaagaacctgatcggagccctgctgttcgacagcggcgaaacagccgaggccacccggctgaagagaaccgccagaagaagatacaccagacggaagaaccggatctgctatctgcaagagatcttcagcaacgagatggccaaggtggacgacagcttcttccacagactggaagagtccttcctggtggaagaggataagaagcacgagcggcaccccatcttcggcaacatcgtggacgaggtggcctaccacgagaagtaccccaccatctaccacctgagaaagaaactggtggacagcaccgacaaggccgacctgcggctgatctatctggccctggcccacatgatcaagttccggggccacttcctgatcgagggcgacctgaaccccgacaacagcgacgtggacaagctgttcatccagctggtgcagacctacaaccagctgttcgaggaaaaccccatcaacgccagcggcgtggacgccaaggccatcctgtctgccagactgagcaagagcagacggctggaaaatctgatcgcccagctgcccggcgagaagaagaatggcctgttcggaaacctgattgccctgagcctgggcctgacccccaacttcaagagcaacttcgacctggccgaggatgccaaactgcagctgagcaaggacacctacgacgacgacctggacaacctgctggcccagatcggcgaccagtacgccgacctgtttctggccgccaagaacctgtccgacgccatcctgctgagcgacatcctgagagtgaacaccgagatcaccaaggcccccctgagcgcctctatgatcaagagatacgacgagcaccaccaggacctgaccctgctgaaagctctcgtgcggcagcagctgcctgagaagtacaaagagattttcttcgaccagagcaagaacggctacgccggctacattgacggcggagccagccaggaagagttctacaagttcatcaagcccatcctggaaaagatggacggcaccgaggaactgctcgtgaagctgaacagagaggacctgctgcggaagcagcggaccttcgacaacggcagcatcccccaccagatccacctgggagagctgcacgccattctgcggcggcaggaagatttttacccattcctgaaggacaaccgggaaaagatcgagaagatcctgaccttccgcatcccctactacgtgggccctctggccaggggaaacagcagattcgcctggatgaccagaaagagcgaggaaaccatcaccccctggaacttcgaggaagtggtggacaagggcgcttccgcccagagcttcatcgagcggatgaccaacttcgataagaacctgcccaacgagaaggtgctgcccaagcacagcctgctgtacgagtacttcaccgtgtataacgagctgaccaaagtgaaatacgtgaccgagggaatgagaaagcccgccttcctgagcggcgagcagaaaaaggccatcgtggacctgctgttcaagaccaaccggaaagtgaccgtgaagcagctgaaagaggactacttcaagaaaatcgagtgcttcgactccgtggaaatctccggcgtggaagatcggttcaacgcctccctgggcacataccacgatctgctgaaaattatcaaggacaaggacttcctggacaatgaggaaaacgaggacattctggaagatatcgtgctgaccctgacactgtttgaggacagagagatgatcgaggaacggctgaaaacctatgcccacctgttcgacgacaaagtgatgaagcagctgaagcggcggagatacaccggctggggcaggctgagccggaagctgatcaacggcatccgggacaagcagtccggcaagacaatcctggatttcctgaagtccgacggcttcgccaacagaaacttcatgcagctgatccacgacgacagcctgacctttaaagaggacatccagaaagcccaggtgtccggccagggcgatagcctgcacgagcacattgccaatctggccggcagccccgccattaagaagggcatcctgcagacagtgaaggtggtggacgagctcgtgaaagtgatgggccggcacaagcccgagaacatcgtgatcgaaatggccagagagaaccagaccacccagaagggacagaagaacagccgcgagagaatgaagcggatcgaagagggcatcaaagagctgggcagccagatcctgaaagaacaccccgtggaaaacacccagctgcagaacgagaagctgtacctgtactacctgcagaatgggcgggatatgtacgtggaccaggaactggacatcaaccggctgtccgactacgatgtggaccatatcgtgcctcagagctttctgaaggacgactccatcgacaacaaggtgctgaccagaagcgacaagaaccggggcaagagcgacaacgtgccctccgaagaggtcgtgaagaagatgaagaactactggcggcagctgctgaacgccaagctgattacccagagaaagttcgacaatctgaccaaggccgagagaggcggcctgagcgaactggataaggccggcttcatcaagagacagctggtggaaacccggcagatcacaaagcacgtggcacagatcctggactcccggatgaacactaagtacgacgagaatgacaagctgatccgggaagtgaaagtgatcaccctgaagtccaagctggtgtccgatttccggaaggatttccagttttacaaagtgcgcgagatcaacaactaccaccacgcccacgacgcctacctgaacgccgtcgtgggaaccgccctgatcaaaaagtaccctaagctggaaagcgagttcgtgtacggcgactacaaggtgtacgacgtgcggaagatgatcgccaagagcgagcaggaaatcggcaaggctaccgccaagtacttcttctacagcaacatcatgaactttttcaagaccgagattaccctggccaacggcgagatccggaagcggcctctgatcgagacaaacggcgaaaccggggagatcgtgtgggataagggccgggattttgccaccgtgcggaaagtgctgagcatgccccaagtgaatatcgtgaaaaagaccgaggtgcagacaggcggcttcagcaaagagtctatcctgcccaagaggaacagcgataagctgatcgccagaaagaaggactgggaccctaagaagtacggcggcttcgacagccccaccgtggcctattctgtgctggtggtggccaaagtggaaaagggcaagtccaagaaactgaagagtgtgaaagagctgctggggatcaccatcatggaaagaagcagcttcgagaagaatcccatcgactttctggaagccaagggctacaaagaagtgaaaaaggacctgatcatcaagctgcctaagtactccctgttcgagctggaaaacggccggaagagaatgctggcctctgccggcgaactgcagaagggaaacgaactggccctgccctccaaatatgtgaacttcctgtacctggccagccactatgagaagctgaagggctcccccgaggataatgagcagaaacagctgtttgtggaacagcacaagcactacctggacgagatcatcgagcagatcagcgagttctccaagagagtgatcctggccgacgctaatctggacaaagtgctgtccgcctacaacaagcaccgggataagcccatcagagagcaggccgagaatatcatccacctgtttaccctgaccaatctgggagcccctgccgccttcaagtactttgacaccaccatcgaccggaagaggtacaccagcaccaaagaggtgctggacgccaccctgatccaccagagcatcaccggcctgtacgagacacggatcgacctgtctcagctgggaggcgacaaaaggccggcggccacgaaaaaggccggccaggcaaaaaagaaaaaggaattcggcagtggagagggcagaggaagtctgctaacatgcggtgacgtcgaggagaatcctggcccagtgagcaagggcgaggagctgttcaccggggtggtgcccatcctggtcgagctggacggcgacgtaaacggccacaagttcagcgtgtccggcgagggcgagggcgatgccacctacggcaagctgaccctgaagttcatctgcaccaccggcaagctgcccgtgccctggcccaccctcgtgaccaccctgacctacggcgtgcagtgcttcagccgctaccccgaccacatgaagcagcacgacttcttcaagtccgccatgcccgaaggctacgtccaggagcgcaccatcttcttcaaggacgacggcaactacaagacccgcgccgaggtgaagttcgagggcgacaccctggtgaaccgcatcgagctgaagggcatcgacttcaaggaggacggcaacatcctggggcacaagctggagtacaactacaacagccacaacgtctatatcatggccgacaagcagaagaacggcatcaaggtgaacttcaagatccgccacaacatcgaggacggcagcgtgcagctcgccgaccactaccagcagaacacccccatcggcgacggccccgtgctgctgcccgacaaccactacctgagcacccagtccgccctgagcaaagaccccaacgagaagcgcgatcacatggtcctgctggagttcgtgaccgccgccgggatcactctcggcatggacgagctgtacaaggaattctaactagagctcgctgatcagcctcgactgtgccttctagttgccagccatctgttgtttgcccctcccccgtgccttccttgaccctggaaggtgccactcccactgtcctttcctaataaaatgaggaaattgcatcgcattgtctgagtaggtgtcattctattctggggggtggggtggggcaggacagcaagggggaggattgggaagagaatagcaggcatgctggggagcggccgcaggaacccctagtgatggagttggccactccctctctgcgcgctcgctcgctcactgaggccgggcgaccaaaggtcgcccgacgcccgggctttgcccgggcggcctcagtgagcgagcgagcgcgcagctgcctgcaggggcgcctgatgcggtattttctccttacgcatctgtgcggtatttcacaccgcatacgtcaaagcaaccatagtacgcgccctgtagcggcgcattaagcgcggcgggtgtggtggttacgcgcagcgtgaccgctacacttgccagcgccttagcgcccgctcctttcgctttcttcccttcctttctcgccacgttcgccggctttccccgtcaagctctaaatcgggggctccctttagggttccgatttagtgctttacggcacctcgaccccaaaaaacttgatttgggtgatggttcacgtagtgggccatcgccctgatagacggtttttcgccctttgacgttggagtccacgttctttaatagtggactcttgttccaaactggaacaacactcaactctatctcgggctattcttttgatttataagggattttgccgatttcggtctattggttaaaaaatgagctgatttaacaaaaatttaacgcgaattttaacaaaatattaacgtttacaattttatggtgcactctcagtacaatctgctctgatgccgcatagttaagccagccccgacacccgccaacacccgctgacgcgccctgacgggcttgtctgctcccggcatccgcttacagacaagctgtgaccgtctccgggagctgcatgtgtcagaggttttcaccgtcatcaccgaaacgcgcgagacgaaagggcctcgtgatacgcctatttttataggttaatgtcatgataataatggtttcttagacgtcaggtggcacttttcggggaaatgtgcgcggaacccctatttgtttatttttctaaatacattcaaatatgtatccgctcatgagacaataaccctgataaatgcttcaataatattgaaaaaggaagagtatgagtattcaacatttccgtgtcgcccttattcccttttttgcggcattttgccttcctgtttttgctcacccagaaacgctggtgaaagtaaaagatgctgaagatcagttgggtgcacgagtgggttacatcgaactggatctcaacagcggtaagatccttgagagttttcgccccgaagaacgttttccaatgatgagcacttttaaagttctgctatgtggcgcggtattatcccgtattgacgccgggcaagagcaactcggtcgccgcatacactattctcagaatgacttggttgagtactcaccagtcacagaaaagcatcttacggatggcatgacagtaagagaattatgcagtgctgccataaccatgagtgataacactgcggccaacttacttctgacaacgatcggaggaccgaaggagctaaccgcttttttgcacaacatgggggatcatgtaactcgccttgatcgttgggaaccggagctgaatgaagccataccaaacgacgagcgtgacaccacgatgcctgtagcaatggcaacaacgttgcgcaaactattaactggcgaactacttactctagcttcccggcaacaattaatagactggatggaggcggataaagttgcaggaccacttctgcgctcggcccttccggctggctggtttattgctgataaatctggagccggtgagcgtggaagccgcggtatcattgcagcactggggccagatggtaagccctcccgtatcgtagttatctacacgacggggagtcaggcaactatggatgaacgaaatagacagatcgctgagataggtgcctcactgattaagcattggtaactgtcagaccaagtttactcatatatactttagattgatttaaaacttcatttttaatttaaaaggatctaggtgaagatcctttttgataatctcatgaccaaaatcccttaacgtgagttttcgttccactgagcgtcagaccccgtagaaaagatcaaaggatcttcttgagatcctttttttctgcgcgtaatctgctgcttgcaaacaaaaaaaccaccgctaccagcggtggtttgtttgccggatcaagagctaccaactctttttccgaaggtaactggcttcagcagagcgcagataccaaatactgttcttctagtgtagccgtagttaggccaccacttcaagaactctgtagcaccgcctacatacctcgctctgctaatcctgttaccagtggctgctgccagtggcgataagtcgtgtcttaccgggttggactcaagacgatagttaccggataaggcgcagcggtcgggctgaacggggggttcgtgcacacagcccagcttggagcgaacgacctacaccgaactgagatacctacagcgtgagctatgagaaagcgccacgcttcccgaagggagaaaggcggacaggtatccggtaagcggcagggtcggaacaggagagcgcacgagggagcttccagggggaaacgcctggtatctttatagtcctgtcgggtttcgccacctctgacttgagcgtcgatttttgtgatgctcgtcaggggggcggagcctatggaaaaacgccagcaacgcggcctttttacggttcctggccttttgctggccttttgctcacatgt

SEQ ID NO: 207 - DNA, 278 bp, Artificial sequence
  synthetic
  promoter (1)..(278): chicken beta-actin promoter
tcgaggtgagccccacgttctgcttcactctccccatctcccccccctccccacccccaattttgtatttatttattttttaattattttgtgcagcgatgggggcggggggggggggggggcgcgcgccgggggggggggggggggggggggggggggggggggcgaggcggagaggtgcggcggcagccaatcagagcggcgcgctccgaaagtttccttttatggcgaggcggcggcggcggcggccctataaaaagcgaagcgcgcggcgggcg

SEQ ID NO: 208 - DNA, 228 bp, Artificial sequence
  synthetic
  Intron (1)..(228): hybrid intron
ggagtcgctgcgcgctgccttcgccccgtgccccgctccgccgccgcctcgcgccgcccgccccggctctgactgaccgcgttactcccacaggtgagcgggcgggacggcccttctcctccgggctgtaattagctgagcaagaggtaagggtttaagggatggttggttggtggggtattaatgtttaattacctggagcacctgcctgaaatcactttttttcag

SEQ ID NO: 209 - DNA, 54 bp, Artificial sequence
  synthetic
  CDS (1)..(54): T2A
gagggcagaggaagtctgctaacatgcggtgacgtcgaggagaatcctggccca

SEQ ID NO: 210 - protein, 18 aa, Artificial sequence
  Synthetic Construct
EGRGSLLTCGDVEENPGP

SEQ ID NO: 211 - DNA, 714 bp, Artificial sequence
  synthetic
  CDS (1)..(714): EGFP
gtgagcaagggcgaggagctgttcaccggggtggtgcccatcctggtcgagctggacggcgacgtaaacggccacaagttcagcgtgtccggcgagggcgagggcgatgccacctacggcaagctgaccctgaagttcatctgcaccaccggcaagctgcccgtgccctggcccaccctcgtgaccaccctgacctacggcgtgcagtgcttcagccgctaccccgaccacatgaagcagcacgacttcttcaagtccgccatgcccgaaggctacgtccaggagcgcaccatcttcttcaaggacgacggcaactacaagacccgcgccgaggtgaagttcgagggcgacaccctggtgaaccgcatcgagctgaagggcatcgacttcaaggaggacggcaacatcctggggcacaagctggagtacaactacaacagccacaacgtctatatcatggccgacaagcagaagaacggcatcaaggtgaacttcaagatccgccacaacatcgaggacggcagcgtgcagctcgccgaccactaccagcagaacacccccatcggcgacggccccgtgctgctgcccgacaaccactacctgagcacccagtccgccctgagcaaagaccccaacgagaagcgcgatcacatggtcctgctggagttcgtgaccgccgccgggatcactctcggcatggacgagctgtacaag

SEQ ID NO: 212 - protein, 238 aa, Artificial sequence
  Synthetic Construct
VSKGEELFTGVVPILVELDGDVNGHKFSVSGEGEGDATYGKLTLKFICTTGKLPVPWPTLVTTLTYGVQCFSRYPDHMKQHDFFKSAMPEGYVQERTIFFKDDGNYKTRAEVKFEGDTLVNRIELKGIDFKEDGNILGHKLEYNYNSHNVYIMADKQKNGIKVNFKIRHNIEDGSVQLADHYQQNTPIGDGPVLLPDNHYLSTQSALSKDPNEKRDHMVLLEFVTAAGITLGMDELYK

SEQ ID NO: 213 - DNA, 141 bp, Artificial sequence
  synthetic
  misc_feature (1)..(141): AAV2 ITR
aggaacccctagtgatggagttggccactccctctctgcgcgctcgctcgctcactgaggccgggcgaccaaaggtcgcccgacgcccgggctttgcccgggcggcctcagtgagcgagcgagcgcgcagctgcctgcagg

SEQ ID NO: 214 - DNA, 3687 bp, Artificial sequence
  synthetic
  misc_feature (1)..(3687): pNleBE plasmid
tcgcgcgtttcggtgatgacggtgaaaacctctgacacatgcagctcccggagttgacggctagctcagtcctaggtattgtgctagcccccataaccgtcgcataagaaggattttatgttatcttcattaaatgtccttcaatccagcttcagaggaaagacagctttatcaaatagtacacttctccagaaagtttcttttgctggaaaagaatattctctggaacctattgatgaaagaacccctattctttttcagtggtttgaagcaaggccagagcgatacgaaaaaggagaagtaccaatattgaataccaaagaacatccgtatttgagcaatattataaatgctgcaaaaatagaaaatgagcgtataatcggtgtgctggtagatggaaattttacttatgaacaaaaaaaggaatttctcaatcttgaaaatgaacatcaaaatataaaaataatctaccgagcagatgtggatttcagcatgtatgataaaaaactatctgatatttaccttgaaaatatccataaacaagaatcataccctgccagtgagagggataattatctgttaggcttattaagagaagagttaaaaaatatcccagaaggtaaggactctttgattgagtcatatgcagaaaaaagagaacatacttggtttgattttttcaggaatttggccatattgaaggctggaagtttgtttacagagacgggaaaaactggatgccataacatatcgccctgtagcggatgtatatatcttgatgccgacatgattattaccgataaattaggagtcctgtatgctcctgatggtatcgctgtgcatgtagattgtaatgatgagataaaaagtcttgaaaatggtgcgatagttgtcaatcgtagtaatcatccagcattacttgcaggcctcgatattatgaagagtaaagttgacgctcatccatattatgatggtctaggaaagggtatcaagcggcattttaactattcatcgttacacaattataatgctttttgtgattttattgaatttaagcatgaaaatattataccgaataccagtatgtataccagcagttcatggtaaccccataaccgtcgcatatcgaggattttatgattaatcctgttactaatactcagggcgtgtcccctataaatactaaatatgctgaacatgtggtgaaaaatatttacccgaaaattaaacatgattactttaatgaatcacccaatatatatgataagaagtatatatccggtataaccagaggagtagctgaactaaaacaggaagaatttgttaacgagaaagccagacggttttcttatatgaagactatgtattctgtatgtccagaagcgtttgaacctatttccagaaatgaagccagtacaccggaaggaagctggctaacagttatatccggaaaacgcccaatggggcagttttctgtagatagtttatacaatcctgatttacatgcattatgtgagcttccggacatttgttgtaagatcttccctaaagaaaataatgattttttatacatagttgttgtgtacagaaatgacagccctctaggagaacaacgggcaaatagatttatagaattatataatataaaaagagatatcatgcaggaattaaattatgagttaccagagttaaaggcagtaaaatctgaaatgattatcgcacgtgaaatgggagaaatctttagctacatgcctggggaaatagacagttatatgaaatacataaataataaactttctaaaattgagtaggctagaggcatcaaataaaacgaaaggctcagtcgaaagactgggcctttcgttttatctgttgtttgtcggtgaacgctctcctgagtaggacaaatacagaatcaggggataacgcaggaaagaacatgtgagcaaaaggccagcaaaaggccaggaaccgtaaaaaggccgcgttgctggcgtttttccataggctccgcccccctgacgagcatcacaaaaatcgacgctcaagtcagaggtggcgaaacccgacaggactataaagataccaggcgtttccccctggaagctccctcgtgcgctctcctgttccgaccctgccgcttaccggatacctgtccgcctttctcccttcgggaagcgtggcgctttctcatagctcacgctgtaggtatctcagttcggtgtaggtcgttcgctccaagctgggctgtgtgcacgaaccccccgttcagcccgaccgctgcgccttatccggtaactatcgtcttgagtccaacccggtaagacacgacttatcgccactggcagcagccactggtaacaggattagcagagcgaggtatgtaggcggtgctacagagttcttgaagtggtggcctaactacggctacactagaagaacagtatttggtatctgcgctctgctgaagccagttaccttcggaaaaagagttggtagctcttgatccggcaaacaaaccaccgctggtagcggtggtttttttgtttgcaagcagcagattacgcgcagaaaaaaaggatctcaagaagatcctttgatcttttctacggggtctgacgctcagtggaacgaaaactcacgttaagggattttggtcatgagattatcaaaaaggatcttcacctagatccttttaaattaaaaatgaagttttaaatcaagcccaatctgaataatgttacaaccaattaaccaattctgattagaaaaactcatcgagcatcaaatgaaactgcaatttattcatatcaggattatcaataccatatttttgaaaaagccgtttctgtaatgaaggagaaaactcaccgaggcagttccataggatggcaagatcctggtatcggtctgcgattccgactcgtccaacatcaatacaacctattaatttcccctcgtcaaaaataaggttatcaagtgagaaatcaccatgagtgacgactgaatccggtgagaatggcaaaagtttatgcatttctttccagacttgttcaacaggccagccattacgctcgtcatcaaaatcactcgcatcaaccaaaccgttattcattcgtgattgcgcctgagcgagacgaaatacgcgatcgctgttaaaaggacaattacaaacaggaatcgaatgcaaccggcgcaggaacactgccagcgcatcaacaatattttcacctgaatcaggatattcttctaatacctggaatgctgtttttccggggatcgcagtggtgagtaaccatgcatcatcaggagtacggataaaatgcttgatggtcggaagaggcataaattccgtcagccagtttagtctgaccatctcatctgtaacatcattggcaacgctacctttgccatgtttcagaaacaactctggcgcatcgggcttcccatacaagcgatagattgtcgcacctgattgcccgacattatcgcgagcccatttatacccatataaatcagcatccatgttggaatttaatcgcggcctcgacgtttcccgttgaatatggctcataacaccccttgtattactgtttatgtaagcagacagttttattgttcatgatgatatatttttatcttgtgcaatgtaacatcagagattttgagacacgggccagagctgca

SEQ ID NO: 215 - DNA, 29 bp, Artificial sequence
  synthetic
  rbs (1)..(29): RBS3
ccccataaccgtcgcataagaaggatttt

SEQ ID NO: 216 - DNA, 990 bp, Artificial sequence
  synthetic
  CDS (1)..(990): nleB gene
atgttatcttcattaaatgtccttcaatccagcttcagaggaaagacagctttatcaaatagtacacttctccagaaagtttcttttgctggaaaagaatattctctggaacctattgatgaaagaacccctattctttttcagtggtttgaagcaaggccagagcgatacgaaaaaggagaagtaccaatattgaataccaaagaacatccgtatttgagcaatattataaatgctgcaaaaatagaaaatgagcgtataatcggtgtgctggtagatggaaattttacttatgaacaaaaaaaggaatttctcaatcttgaaaatgaacatcaaaatataaaaataatctaccgagcagatgtggatttcagcatgtatgataaaaaactatctgatatttaccttgaaaatatccataaacaagaatcataccctgccagtgagagggataattatctgttaggcttattaagagaagagttaaaaaatatcccagaaggtaaggactctttgattgagtcatatgcagaaaaaagagaacatacttggtttgattttttcaggaatttggccatattgaaggctggaagtttgtttacagagacgggaaaaactggatgccataacatatcgccctgtagcggatgtatatatcttgatgccgacatgattattaccgataaattaggagtcctgtatgctcctgatggtatcgctgtgcatgtagattgtaatgatgagataaaaagtcttgaaaatggtgcgatagttgtcaatcgtagtaatcatccagcattacttgcaggcctcgatattatgaagagtaaagttgacgctcatccatattatgatggtctaggaaagggtatcaagcggcattttaactattcatcgttacacaattataatgctttttgtgattttattgaatttaagcatgaaaatattataccgaataccagtatgtataccagcagttcatggtaa

SEQ ID NO: 217 - protein, 329 aa, Artificial sequence
  Synthetic Construct
MLSSLNVLQSSFRGKTALSNSTLLQKVSFAGKEYSLEPIDERTPILFQWFEARPERYEKGEVPILNTKEHPYLSNIINAAKIENERIIGVLVDGNFTYEQKKEFLNLENEHQNIKIIYRADVDFSMYDKKLSDIYLENIHKQESYPASERDNYLLGLLREELKNIPEGKDSLIESYAEKREHTWFDFFRNLAILKAGSLFTETGKTGCHNISPCSGCIYLDADMIITDKLGVLYAPDGIAVHVDCNDEIKSLENGAIVVNRSNHPALLAGLDIMKSKVDAHPYYDGLGKGIKRHFNYSSLHNYNAFCDFIEFKHENIIPNTSMYTSSSW

SEQ ID NO: 218 - DNA, 29 bp, Artificial sequence
  synthetic
  RBS (1)..(29): RBS4
ccccataaccgtcgcatatcgaggatttt

SEQ ID NO: 219 - DNA, 675 bp, Artificial sequence
  synthetic
  CDS (1)..(675): nleE gene
atgattaatcctgttactaatactcagggcgtgtcccctataaatactaaatatgctgaacatgtggtgaaaaatatttacccgaaaattaaacatgattactttaatgaatcacccaatatatatgataagaagtatatatccggtataaccagaggagtagctgaactaaaacaggaagaatttgttaacgagaaagccagacggttttcttatatgaagactatgtattctgtatgtccagaagcgtttgaacctatttccagaaatgaagccagtacaccggaaggaagctggctaacagttatatccggaaaacgcccaatggggcagttttctgtagatagtttatacaatcctgatttacatgcattatgtgagcttccggacatttgttgtaagatcttccctaaagaaaataatgattttttatacatagttgttgtgtacagaaatgacagccctctaggagaacaacgggcaaatagatttatagaattatataatataaaaagagatatcatgcaggaattaaattatgagttaccagagttaaaggcagtaaaatctgaaatgattatcgcacgtgaaatgggagaaatctttagctacatgcctggggaaatagacagttatatgaaatacataaataataaactttctaaaattgagtag

SEQ ID NO: 220 - protein, 224 aa, Artificial sequence
  Synthetic Construct
MINPVTNTQGVSPINTKYAEHVVKNIYPKIKHDYFNESPNIYDKKYISGITRGVAELKQEEFVNEKARRFSYMKTMYSVCPEAFEPISRNEASTPEGSWLTVISGKRPMGQFSVDSLYNPDLHALCELPDICCKIFPKENNDFLYIVVVYRNDSPLGEQRANRFIELYNIKRDIMQELNYELPELKAVKSEMIIAREMGEIFSYMPGEIDSYMKYINNKLSKIE

SEQ ID NO: 221 - DNA, 3075 bp, Artificial sequence
  synthetic
  misc_feature (1)..(3075): pUC57-ansB plasmid
ccaatgatcggccgcggcaattgacggctagctcagtcctaggtacagtgctagcccccataaccgtcgcatatagaggattttatggagtttttcaaaaagacggcacttgccgcactggttatgggttttagtggtgcagcattggcattacccaatatcaccattttagcaaccggcgggaccattgccggtggtggtgactccgcaaccaaatctaactacacagtgggtaaagttggcgtagaaaatctggttaatgcggtgccgcaactaaaagacattgcgaacgttaaaggcgagcaggtagtgaatatcggctcccaggacatgaacgataatgtctggctgacactggcgaaaaaaattaacaccgactgcgataagaccgacggcttcgtcattacccacggtaccgacacgatggaagaaactgcttacttcctcgacctgacggtgaaatgcgacaaaccggtggtgatggtcggcgcaatgcgtccgtccacgtctatgagcgcagacggtccattcaacctgtataacgcggtagtgaccgcagctgataaagcctccgccaaccgtggcgtgctggtagtgatgaatgacaccgtgcttgatggccgtgacgtcaccaaaaccaacaccaccgacgtagcgaccttcaagtctgttaactacggtcctctgggttacattcacaacggtaagattgactaccagcgtaccccggcacgtaagcataccagcgacacgccattcgatgtctctaagctgaatgaactgccgaaagtcggcattgtttataactacgctaacgcatccgatcttccggctaaagcactggtagatgcgggctatgatggcatcgttagcgctggtgtgggtaacggcaacctgtataaatctgtgttcgacacgctggcgaccgccgcgaaaaccggtactgcagtcgtgcgttcttcccgcgtaccgacgggcgctaccactcaggatgccgaagtggatgatgcgaaatacggcttcgtcgcctctggcacgctgaacccgcaaaaagcgcgcgttctgctgcaactggctctgacgcaaaccaaagatccgcagcagatccagcagatcttcaatcagtactaaggcggccgcggcaaattccaaataaaacgaaaggctcagtcgaaagactgggcctttcgttttatctgttgtttgtcggtgaacgctctcctgagtaggacaaatggcggcaaattcatcggaaagaacatgtgagcaaaaggccagcaaaaggccaggaaccgtaaaaaggccgcgttgctggcgtttttccataggctccgcccccctgacgagcatcacaaaaatcgacgctcaagtcagaggtggcgaaacccgacaggactataaagataccaggcgtttccccctggaagctccctcgtgcgctctcctgttccgaccctgccgcttaccggatacctgtccgcctttctcccttcgggaagcgtggcgctttctcatagctcacgctgtaggtatctcagttcggtgtaggtcgttcgctccaagctgggctgtgtgcacgaaccccccgttcagcccgaccgctgcgccttatccggtaactatcgtcttgagtccaacccggtaagacacgacttatcgccactggcagcagccactggtaacaggattagcagagcgaggtatgtaggcggtgctacagagttcttgaagtggtggcctaactacggctacactagaagaacagtatttggtatctgcgctctgctgaagccagttaccttcggaaaaagagttggtagctcttgatccggcaaacaaaccaccgctggtagcggtggtttttttgtttgcaagcagcagattacgcgcagaaaaaaaggatctcaagaagatcctttgatcttttctacggggtctgacgctcagtggaacgaaaactcacgttaagggattttggtcatgagattatcaaaaaggatcttcacctagatccttttaaattaaaaatgaagttttaaatcaatctaaagtatatatgagtaaacttggtctgacagttaccaatgcttaatcagtgaggcacctatctcagcgatctgtctatttcgttcatccatagttgcctgactccccgtcgtgtagataactacgatacgggagggcttaccatctggccccagtgctgcaatgataccgcgagacccacgctcaccggctccagatttatcagcaataaaccagccagccggaagggccgagcgcagaagtggtcctgcaactttatccgcctccatccagtctattaattgttgccgggaagctagagtaagtagttcgccagttaatagtttgcgcaacgttgttgccattgctacaggcatcgtggtgtcacgctcgtcgtttggtatggcttcattcagctccggttcccaacgatcaaggcgagttacatgatcccccatgttgtgcaaaaaagcggttagctccttcggtcctccgatcgttgtcagaagtaagttggccgcagtgttatcactcatggttatggcagcactgcataattctcttactgtcatgccatccgtaagatgcttttctgtgactggtgagtactcaaccaagtcattctgagaatagtgtatgcggcgaccgagttgctcttgcccggcgtcaatacgggataataccgcgccacatagcagaactttaaaagtgctcatcattggaaaacgttcttcggggcgaaaactctcaaggatcttaccgctgttgagatccagttcgatgtaacccactcgtgcacccaactgatcttcagcatcttttactttcaccagcgtttctgggtgagcaaaaacaggaaggcaaaatgccgcaaaaaagggaataagggcgacacggaaatgttgaatactcatactcttcctttttcaatattattgaagcatttatcagggttattgtctcatgagcggatacatatttgaatgtatttagaaaaataaacaaataggggttccgcgcacatttccccgaaaagtgccacctgacgtc

SEQ ID NO: 222 - DNA, 1047 bp, Artificial sequence
  synthetic
  CDS (1)..(1047): ansB gene
atggagtttttcaaaaagacggcacttgccgcactggttatgggttttagtggtgcagcattggcattacccaatatcaccattttagcaaccggcgggaccattgccggtggtggtgactccgcaaccaaatctaactacacagtgggtaaagttggcgtagaaaatctggttaatgcggtgccgcaactaaaagacattgcgaacgttaaaggcgagcaggtagtgaatatcggctcccaggacatgaacgataatgtctggctgacactggcgaaaaaaattaacaccgactgcgataagaccgacggcttcgtcattacccacggtaccgacacgatggaagaaactgcttacttcctcgacctgacggtgaaatgcgacaaaccggtggtgatggtcggcgcaatgcgtccgtccacgtctatgagcgcagacggtccattcaacctgtataacgcggtagtgaccgcagctgataaagcctccgccaaccgtggcgtgctggtagtgatgaatgacaccgtgcttgatggccgtgacgtcaccaaaaccaacaccaccgacgtagcgaccttcaagtctgttaactacggtcctctgggttacattcacaacggtaagattgactaccagcgtaccccggcacgtaagcataccagcgacacgccattcgatgtctctaagctgaatgaactgccgaaagtcggcattgtttataactacgctaacgcatccgatcttccggctaaagcactggtagatgcgggctatgatggcatcgttagcgctggtgtgggtaacggcaacctgtataaatctgtgttcgacacgctggcgaccgccgcgaaaaccggtactgcagtcgtgcgttcttcccgcgtaccgacgggcgctaccactcaggatgccgaagtggatgatgcgaaatacggcttcgtcgcctctggcacgctgaacccgcaaaaagcgcgcgttctgctgcaactggctctgacgcaaaccaaagatccgcagcagatccagcagatcttcaatcagtactaa

SEQ ID NO: 223 - protein, 348 aa, Artificial sequence
  Synthetic Construct
MEFFKKTALAALVMGFSGAALALPNITILATGGTIAGGGDSATKSNYTVGKVGVENLVNAVPQLKDIANVKGEQVVNIGSQDMNDNVWLTLAKKINTDCDKTDGFVITHGTDTMEETAYFLDLTVKCDKPVVMVGAMRPSTSMSADGPFNLYNAVVTAADKASANRGVLVVMNDTVLDGRDVTKTNTTDVATFKSVNYGPLGYIHNGKIDYQRTPARKHTSDTPFDVSKLNELPKVGIVYNYANASDLPAKALVDAGYDGIVSAGVGNGNLYKSVFDTLATAAKTGTAVVRSSRVPTGATTQDAEVDDAKYGFVASGTLNPQKARVLLQLALTQTKDPQQIQQIFNQY

SEQ ID NO: 224 - DNA, 8872 bp, Artificial sequence
  synthetic
  misc_feature (1)..(8872): pSLCAR-CD19-BBz plasmid
gacattgattattgactagttattaatagtaatcaattacggggtcattagttcatagcccatatatggagttccgcgttacataacttacggtaaatggcccgcctggctgaccgcccaacgacccccgcccattgacgtcaataatgacgtatgttcccatagtaacgccaatagggactttccattgacgtcaatgggtggagtatttacggtaaactgcccacttggcagtacatcaagtgtatcatatgccaagtacgccccctattgacgtcaatgacggtaaatggcccgcctggcattatgcccagtacatgaccttatgggactttcctacttggcagtacatctacgtattagtcatcgctattaccatggtgatgcggttttggcagtacatcaatgggcgtggatagcggtttgactcacggggatttccaagtctccaccccattgacgtcaatgggagtttgttttggcaccaaaatcaacgggactttccaaaatgtcgtaacaactccgccccattgacgcaaatgggcggtaggcgtgtacggtgggaggtctatataagcagcgcgttttgcctgtactgggtctctctggttagaccagatctgagcctgggagctctctggctaactagggaacccactgcttaagcctcaataaagcttgccttgagtgcttcaagtagtgtgtgcccgtctgttgtgtgactctggtaactagagatccctcagacccttttagtcagtgtggaaaatctctagcagtggcgcccgaacagggacttgaaagcgaaagggaaaccagaggagctctctcgacgcaggactcggcttgctgaagcgcgcacggcaagaggcgaggggcggcgactggtgagtacgccaaaaattttgactagcggaggctagaaggagagagatgggtgcgagagcgtcagtattaagcgggggagaattagatcgcgatgggaaaaaattcggttaaggccagggggaaagaaaaaatataaattaaaacatatagtatgggcaagcagggagctagaacgattcgcagttaatcctggcctgttagaaacatcagaaggctgtagacaaatactgggacagctacaaccatcccttcagacaggatcagaagaacttagatcattatataatacagtagcaaccctctattgtgtgcatcaaaggatagagataaaagacaccaaggaagctttagacaagatagaggaagagcaaaacaaaagtaagaccaccgcacagcaagcggccgctgatcttcagacctggaggaggagatatgagggacaattggagaagtgaattatataaatataaagtagtaaaaattgaaccattaggagtagcacccaccaaggcaaagagaagagtggtgcagagagaaaaaagagcagtgggaataggagctttgttccttgggttcttgggagcagcaggaagcactatgggcgcagcgtcaatgacgctgacggtacaggccagacaattattgtctggtatagtgcagcagcagaacaatttgctgagggctattgaggcgcaacagcatctgttgcaactcacagtctggggcatcaagcagctccaggcaagaatcctggctgtggaaagatacctaaaggatcaacagctcctggggatttggggttgctctggaaaactcatttgcaccactgctgtgccttggaatgctagttggagtaataaatctctggaacagatttggaatcacacgacctggatggagtgggacagagaaattaacaattacacaagcttaatacactccttaattgaagaatcgcaaaaccagcaagaaaagaatgaacaagaattattggaattagataaatgggcaagtttgtggaattggtttaacataacaaattggctgtggtatataaaattattcataatgatagtaggaggcttggtaggtttaagaatagtttttgctgtactttctatagtgaatagagttaggcagggatattcaccattatcgtttcagacccacctcccaaccccgaggggaccccgggtttattacagggacagcagagatccactttggcgccggctcgagttttaaaagaaaaggggggattggggggtacagtgcaggggaaagaatagtagacataatagcaacagacatacaaactaaagaattacaaaaacaaattacaaaaattcaaaatttttcgagtggctccggtgcccgtcagtgggcagagcgcacatcgcccacagtccccgagaagttggggggaggggtcggcaattgaaccggtgcctagagaaggtggcgcggggtaaactgggaaagtgatgtcgtgtactggctccgcctttttcccgagggtgggggagaaccgtatataagtgcagtagtcgccgtgaacgttctttttcgcaacgggtttgccgccagaacacaggtgtcgtgacgcgggatccgccaccatgctcaggctgctcttggctctcaacttattcccttcaattcaagtaacaggagggtcttcggactacaaggatcatgacggagactataaggatcacgatattgattacaaagatgacgacgacaaagacatccagatgacacagactacatcctccctgtctgcctctctgggagacagagtcaccatcagttgcagggcaagtcaggacatctctaagtatttgaattggtatcagcagaaaccagatggaactgttaaactcctgatctaccatacatcaagattacactcaggagtcccatcaaggttcagtggcagtgggtctggaacagattattctctcaccattagcaacctggagcaagaagatattgccacttacttttgccaacagggtaatacgcttccgtacacgttcggaggggggactaagttggaaataacaggctccacctctggatccggcaagcccggatctggcgagggatccaccaagggcgaggtgaaactgcaggagtcaggacctggcctggtggcgccctcacagagcctgtccgtcacatgcactgtctcaggggtctcattacccgactatggtgtaagctggattcgccagcctccacgaaagggtctggagtggctgggagtaatatggggtagtgaaaccacatactataattcagctctcaaatccagactgaccatcatcaaggacaactccaagagccaagttttcttaaaaatgaacagtctgcaaactgatgacacagccatttactactgtgccaaacattattactacggtggtagctatgctatggactactggggtcaaggaacctcagtcaccgtctcctcagcggccgcaggtaccaccacaacgcccgctcctcggccaccgacgccagcgccaactattgcgagtcagcctctcagtctgcgacctgaggcttgtcgaccagcagccggaggcgcagtgcacacgagggggctggacttcgcctgtgatagaagacctccttctaagcccttttgggtgctggtggtggttggtggagtcctggcttgctatagcttgctagtaacagtggcctttattattttctgggtgaggaaacggggcagaaagaaactcctgtatatattcaaacaaccatttatgagaccagtacaaactactcaagaggaagatggctgtagctgccgatttccagaagaagaagaaggaggatgtgaactggctagcctgagagtgaagttcagcaggagcgcagacgcccccgcgtaccagcagggccagaaccagctctataacgagctcaatctaggacgaagagaggagtacgatgttttggacaagagacgtggccgggaccctgagatggggggaaagccgcagagaaggaagaaccctcaggaaggcctgtacaatgaactgcagaaagataagatggcggaggcctacagtgagattgggatgaaaggcgagcgccggaggggcaaggggcacgatggcctttaccagggtctcagtacagccaccaaggacacctacgacgcccttcacatgcaggccctgccccctcgcgctagcgccacgaacttctctctgttaaagcaagcaggcgacgtggaagaaaaccccggtcccgtgagcaagggcgaggagctgttcaccggggtggtgcccatcctggtcgagctggacggcgacgtaaacggccacaagttcagcgtgtccggcgagggcgagggcgatgccacctacggcaagctgaccctgaagttcatctgcaccaccggcaagctgcccgtgccctggcccaccctcgtgaccaccctgacctacggcgtgcagtgcttcagccgctaccccgaccacatgaagcagcacgacttcttcaagtccgccatgcccgaaggctacgtccaggagcgcaccatcttcttcaaggacgacggcaactacaagacccgcgccgaggtgaagttcgagggcgacaccctggtgaaccgcatcgagctgaagggcatcgacttcaaggaggacggcaacatcctggggcacaagctggagtacaactacaacagccacaacgtctatatcatggccgacaagcagaagaacggcatcaaggtgaacttcaagatccgccacaacatcgaggacggcagcgtgcagctcgccgaccactaccagcagaacacccccatcggcgacggccccgtgctgctgcccgacaaccactacctgagcacccagtccgccctgagcaaagaccccaacgagaagcgcgatcacatggtcctgctggagttcgtgaccgccgccgggatcactctcggcatggacgagctgtacaagtaacgcgttaagtcgacaatcaacctctggattacaaaatttgtgaaagattgactggtattcttaactatgttgctccttttacgctatgtggatacgctgctttaatgcctttgtatcatgctattgcttcccgtatggctttcattttctcctccttgtataaatcctggttgctgtctctttatgaggagttgtggcccgttgtcaggcaacgtggcgtggtgtgcactgtgtttgctgacgcaacccccactggttggggcattgccaccacctgtcagctcctttccgggactttcgctttccccctccctattgccacggcggaactcatcgccgcctgccttgcccgctgctggacaggggctcggctgttgggcactgacaattccgtggtgttgtcggggaaatcatcgtcctttccttggctgctcgcctgtgttgccacctggattctgcgcgggacgtccttctgctacgtcccttcggccctcaatccagcggaccttccttcccgcggcctgctgccggctctgcggcctcttccgcgtctttgccttcgccctcagacgagtcggatctccctttgggccgcctccccgcgtcgactttaagaccaatgacttacaaggcagctgtagatcttagccactttttaaaagaaaaggggggactggaagggctaattcactcccaacgaagataagatctgctttttgcttgtactgggtctctctggttagaccagatctgagcctgggagctctctggctaactagggaacccactgcttaagcctcaataaagcttgccttgagtgcttcaagtagtgtgtgcccgtctgttgtgtgactctggtaactagagatccctcagacccttttagtcagtgtggaaaatctctagcagtacgtatagtagttcatgtcatcttattattcagtatttataacttgcaaagaaatgaatatcagagagtgagaggaacttgtttattgcagcttataatggttacaaataaagcaatagcatcacaaatttcacaaataaagcatttttttcactgcattctagttgtggtttgtccaaactcatcaatgtatcttatcatgtctggctctagctatcccgcccctaactccgcccatcccgcccctaactccgcccagttccgcccattctccgccccatggctgactaattttttttatttatgcagaggccgaggccgcctcggcctctgagctattccagaagtagtgaggaggcttttttggaggcctagggacgtacccaattcgccctatagtgagtcgtattacgcgcgctcactggccgtcgttttacaacgtcgtgactgggaaaaccctggcgttacccaacttaatcgccttgcagcacatccccctttcgccagctggcgtaatagcgaagaggcccgcaccgatcgcccttcccaacagttgcgcagcctgaatggcgaatgggacgcgccctgtagcggcgcattaagcgcggcgggtgtggtggttacgcgcagcgtgaccgctacacttgccagcgccctagcgcccgctcctttcgctttcttcccttcctttctcgccacgttcgccggctttccccgtcaagctctaaatcgggggctccctttagggttccgatttagtgctttacggcacctcgaccccaaaaaacttgattagggtgatggttcacgtagtgggccatcgccctgatagacggtttttcgccctttgacgttggagtccacgttctttaatagtggactcttgttccaaactggaacaacactcaaccctatctcggtctattcttttgatttataagggattttgccgatttcggcctattggttaaaaaatgagctgatttaacaaaaatttaacgcgaattttaacaaaatattaacgcttacaatttaggtggcacttttcggggaaatgtgcgcggaacccctatttgtttatttttctaaatacattcaaatatgtatccgctcatgagacaataaccctgataaatgcttcaataatattgaaaaaggaagagtatgagtattcaacatttccgtgtcgcccttattcccttttttgcggcattttgccttcctgtttttgctcacccagaaacgctggtgaaagtaaaagatgctgaagatcagttgggtgcacgagtgggttacatcgaactggatctcaacagcggtaagatccttgagagttttcgccccgaagaacgttttccaatgatgagcacttttaaagttctgctatgtggcgcggtattatcccgtattgacgccgggcaagagcaactcggtcgccgcatacactattctcagaatgacttggttgagtactcaccagtcacagaaaagcatcttacggatggcatgacagtaagagaattatgcagtgctgccataaccatgagtgataacactgcggccaacttacttctgacaacgatcggaggaccgaaggagctaaccgcttttttgcacaacatgggggatcatgtaactcgccttgatcgttgggaaccggagctgaatgaagccataccaaacgacgagcgtgacaccacgatgcctgtagcaatggcaacaacgttgcgcaaactattaactggcgaactacttactctagcttcccggcaacaattaatagactggatggaggcggataaagttgcaggaccacttctgcgctcggcccttccggctggctggtttattgctgataaatctggagccggtgagcgtgggtctcgcggtatcattgcagcactggggccagatggtaagccctcccgtatcgtagttatctacacgacggggagtcaggcaactatggatgaacgaaatagacagatcgctgagataggtgcctcactgattaagcattggtaactgtcagaccaagtttactcatatatactttagattgatttaaaacttcatttttaatttaaaaggatctaggtgaagatcctttttgataatctcatgaccaaaatcccttaacgtgagttttcgttccactgagcgtcagaccccgtagaaaagatcaaaggatcttcttgagatcctttttttctgcgcgtaatctgctgcttgcaaacaaaaaaaccaccgctaccagcggtggtttgtttgccggatcaagagctaccaactctttttccgaaggtaactggcttcagcagagcgcagataccaaatactgttcttctagtgtagccgtagttaggccaccacttcaagaactctgtagcaccgcctacatacctcgctctgctaatcctgttaccagtggctgctgccagtggcgataagtcgtgtcttaccgggttggactcaagacgatagttaccggataaggcgcagcggtcgggctgaacggggggttcgtgcacacagcccagcttggagcgaacgacctacaccgaactgagatacctacagcgtgagctatgagaaagcgccacgcttcccgaagggagaaaggcggacaggtatccggtaagcggcagggtcggaacaggagagcgcacgagggagcttccagggggaaacgcctggtatctttatagtcctgtcgggtttcgccacctctgacttgagcgtcgatttttgtgatgctcgtcaggggggcggagcctatggaaaaacgccagcaacgcggcctttttacggttcctggccttttgctggccttttgctcacatgtgtcgacggatcgggagatctcccgatcccctatggtgcactctcagtacaatctgctctgatgccgcatagttaagccagtatctgctccctgcttgtgtgttggaggtcgctgagtagtgcgcgagcaaaatttaagctacaacaaggcaaggcttgaccgacaattgcatgaagaatctgcttagggttaggcgttttgcgctgcttcgcgatgtacgggccagatatacgcgtt

SEQ ID NO: 225 - DNA, 126 bp, Artificial sequence
  synthetic
  misc_feature (1)..(126): HIV-1 Psi
ctctctcgacgcaggactcggcttgctgaagcgcgcacggcaagaggcgaggggcggcgactggtgagtacgccaaaaattttgactagcggaggctagaaggagagagatgggtgcgagagcgtc

SEQ ID NO: 226 - DNA, 234 bp, Artificial sequence
  synthetic
  misc_feature (1)..(234): RRE
aggagctttgttccttgggttcttgggagcagcaggaagcactatgggcgcagcgtcaatgacgctgacggtacaggccagacaattattgtctggtatagtgcagcagcagaacaatttgctgagggctattgaggcgcaacagcatctgttgcaactcacagtctggggcatcaagcagctccaggcaagaatcctggctgtggaaagatacctaaaggatcaacagctcct

SEQ ID NO: 227 - DNA, 118 bp, Artificial sequence
  synthetic
  misc_feature (1)..(118): cPPT/CTS
ttttaaaagaaaaggggggattggggggtacagtgcaggggaaagaatagtagacataatagcaacagacatacaaactaaagaattacaaaaacaaattacaaaaattcaaaatttt

SEQ ID NO: 228 - DNA, 212 bp, Artificial sequence
  synthetic
  promoter (1)..(212): EF-1-alpha core promoter
gggcagagcgcacatcgcccacagtccccgagaagttggggggaggggtcggcaattgaaccggtgcctagagaaggtggcgcggggtaaactgggaaagtgatgtcgtgtactggctccgcctttttcccgagggtgggggagaaccgtatataagtgcagtagtcgccgtgaacgttctttttcgcaacgggtttgccgccagaacacag

SEQ ID NO: 229 - DNA, 1470 bp, Artificial sequence
  synthetic
  CDS (1)..(1470)
gacatccagatgacacagactacatcctccctgtctgcctctctgggagacagagtcaccatcagttgcagggcaagtcaggacatctctaagtatttgaattggtatcagcagaaaccagatggaactgttaaactcctgatctaccatacatcaagattacactcaggagtcccatcaaggttcagtggcagtgggtctggaacagattattctctcaccattagcaacctggagcaagaagatattgccacttacttttgccaacagggtaatacgcttccgtacacgttcggaggggggactaagttggaaataacaggctccacctctggatccggcaagcccggatctggcgagggatccaccaagggcgaggtgaaactgcaggagtcaggacctggcctggtggcgccctcacagagcctgtccgtcacatgcactgtctcaggggtctcattacccgactatggtgtaagctggattcgccagcctccacgaaagggtctggagtggctgggagtaatatggggtagtgaaaccacatactataattcagctctcaaatccagactgaccatcatcaaggacaactccaagagccaagttttcttaaaaatgaacagtctgcaaactgatgacacagccatttactactgtgccaaacattattactacggtggtagctatgctatggactactggggtcaaggaacctcagtcaccgtctcctcagcggccgcaggtaccaccacaacgcccgctcctcggccaccgacgccagcgccaactattgcgagtcagcctctcagtctgcgacctgaggcttgtcgaccagcagccggaggcgcagtgcacacgagggggctggacttcgcctgtgatagaagacctccttctaagcccttttgggtgctggtggtggttggtggagtcctggcttgctatagcttgctagtaacagtggcctttattattttctgggtgaggaaacggggcagaaagaaactcctgtatatattcaaacaaccatttatgagaccagtacaaactactcaagaggaagatggctgtagctgccgatttccagaagaagaagaaggaggatgtgaactggctagcctgagagtgaagttcagcaggagcgcagacgcccccgcgtaccagcagggccagaaccagctctataacgagctcaatctaggacgaagagaggagtacgatgttttggacaagagacgtggccgggaccctgagatggggggaaagccgcagagaaggaagaaccctcaggaaggcctgtacaatgaactgcagaaagataagatggcggaggcctacagtgagattgggatgaaaggcgagcgccggaggggcaaggggcacgatggcctttaccagggtctcagtacagccaccaaggacacctacgacgcccttcacatgcaggccctgccccctcgcgctagc

SEQ ID NO: 230 - protein, 490 aa, Artificial sequence
  Synthetic Construct
DIQMTQTTSSLSASLGDRVTISCRASQDISKYLNWYQQKPDGTVKLLIYHTSRLHSGVPSRFSGSGSGTDYSLTISNLEQEDIATYFCQQGNTLPYTFGGGTKLEITGSTSGSGKPGSGEGSTKGEVKLQESGPGLVAPSQSLSVTCTVSGVSLPDYGVSWIRQPPRKGLEWLGVIWGSETTYYNSALKSRLTIIKDNSKSQVFLKMNSLQTDDTAIYYCAKHYYYGGSYAMDYWGQGTSVTVSSAAAGTTTTPAPRPPTPAPTIASQPLSLRPEACRPAAGGAVHTRGLDFACDRRPPSKPFWVLVVVGGVLACYSLLVTVAFIIFWVRKRGRKKLLYIFKQPFMRPVQTTQEEDGCSCRFPEEEEGGCELASLRVKFSRSADAPAYQQGQNQLYNELNLGRREEYDVLDKRRGRDPEMGGKPQRRKNPQEGLYNELQKDKMAEAYSEIGMKGERRRGKGHDGLYQGLSTATKDTYDALHMQALPPRAS

SEQ ID NO: 231 - DNA, 57 bp, Artificial sequence
  synthetic
  misc_feature (1)..(57): P2A
gccacgaacttctctctgttaaagcaagcaggcgacgtggaagaaaaccccggtccc

SEQ ID NO: 232 - DNA, 589 bp, Artificial sequence
  synthetic
  misc_feature (1)..(589): WPRE
aatcaacctctggattacaaaatttgtgaaagattgactggtattcttaactatgttgctccttttacgctatgtggatacgctgctttaatgcctttgtatcatgctattgcttcccgtatggctttcattttctcctccttgtataaatcctggttgctgtctctttatgaggagttgtggcccgttgtcaggcaacgtggcgtggtgtgcactgtgtttgctgacgcaacccccactggttggggcattgccaccacctgtcagctcctttccgggactttcgctttccccctccctattgccacggcggaactcatcgccgcctgccttgcccgctgctggacaggggctcggctgttgggcactgacaattccgtggtgttgtcggggaaatcatcgtcctttccttggctgctcgcctgtgttgccacctggattctgcgcgggacgtccttctgctacgtcccttcggccctcaatccagcggaccttccttcccgcggcctgctgccggctctgcggcctcttccgcgtctttgccttcgccctcagacgagtcggatctccctttgggccgcctccccgc

SEQ ID NO: 233 - DNA, 234 bp, Artificial sequence
  synthetic
  misc_feature (1)..(234): 3' LTR (Delta-U3)
tggaagggctaattcactcccaacgaagataagatctgctttttgcttgtactgggtctctctggttagaccagatctgagcctgggagctctctggctaactagggaacccactgcttaagcctcaataaagcttgccttgagtgcttcaagtagtgtgtgcccgtctgttgtgtgactctggtaactagagatccctcagacccttttagtcagtgtggaaaatctctagca

SEQ ID NO: 234 - DNA, 7673 bp, Artificial sequence
  synthetic
  misc_feature (1)..(7673): pCS6
cacttcggattatcccgtgacaggtcattcagactggctaatgcacccagtaaggcagcggtatcatcaacaggcttacccgtcttactgtccctagtgcttggattctcaccaataaaaaacgcccggcggcaaccgagcgttctgaacaaatccagatggagttctgaggtcattactggatctatcaacaggagtccaagcgagctcgatatccgtcggcttgaacgaattgttagacattatttgccgactaccttggtgatctcgcctttcacgtagtggacaaattcttccaactgatctgcgcgcgaggccaagcgatcttcttcttgtccaagataagcctgtctagcttcaagtatgacgggctgatactgggccggcaggcgctccattgcccagtcggcagcgacatccttcggcgcgattttgccggttactgcgctgtaccaaatgcgggacaacgtaagcactacatttcgctcatcgccagcccagtcgggcggcgagttccatagcgttaaggtttcatttagcgcctcaaatagatcctgttcaggaaccggatcaaagagttcctccgccgctggacctaccaaggcaacgctatgttctcttgcttttgtcagcaagatagccagatcaatgtcgtacgtggctggctcgaagatacctgcaagaatgtcattgcgctgccattctccaaattgcagttcgcgcttagctggataacgccacggaatgatgtcgtcgtgcacaacaatggtgacttctacagcgcggagaatctcgctctctccaggggaagccgaagtttccaaaaggtcgttgatcaaagctcgccgcgttgtttcatcaagccttacggtcaccgtaaccagcaaatcaatatcactgtgtggcttcaggccgccatccactgcggagccgtacaaatgtacggccagcaacgtcggttcgagatggcgctcgatgacgccaactacctctgatagttgagtcgatacttcggcgatcaccgcttccctcatgatgtttaactttgttttagggcgactgccctgctgcgtaacatcgttgctgctccataacatcaaacatcgacccacggcgtaacgcgcttgctgcttggatgcccgaggcatagactgtaccccaaaaaaacatgtcataacaagaagccatgaaaaccgccactgcgccgttaccaccgctgcgttcggtcaaggttgtggaccagttgcgtgacggcagttacgctacttgcattacagcttacgaaatgtgcctgtcaaatggacgaagcagggattctgcaaaccctatgctactccgtcaagccgtcaattgtctgattcgttaccaattatgacaacttgacggctacatcattcactttttcttcacaaccggcacggaactcgctcgggctggccccggtgcattttttaaatacccgcgagaaatagagttgatcgtcaaaaccaacattgcgaccgacggtggcgataggcatccgggtggtgctcaaaagcagcttcgcctggctgatacgttggtcctcgcgccagcttaagacgctaatccctaactgctggcggaaaagatgtgacagacgcgacggcgacaagcaaacatgctgtgcgacgctggcgatatcaaaattgctgtctgccaggtgatcgctgatgtactgacaagcctcgcgtacccgattatccatcggtggatggagcgactcgttaatcgcttccatgcgccgcagtaacaattgctcaagcagatttatcgccagcagctccgaatagcgcccttccccttgcccggcgttaatgatttgcccaaacaggtcgctgaaatgcggctggtgcgcttcatccgggcgaaagaaccccgtattggcaaatattgacggccagttaagccattcatgccagtaggcgcgcggacgaaagtaaacccactggtgataccattcgcgagcctccggatgacgaccgtagtgatgaatctctcctggcgggaacagcaaaatatcacccggtcggcaaacaaattctcgtccctgatttttcaccaccccctgaccgcgaatggtgagattgagaatataacctttcattcccagcggtcggtcgataaaaaaatcgagataaccgttggcctcaatcggcgttaaacccgccaccagatgggcattaaacgagtatcccggcagcaggggatcattttgcgcttcagccatacttttcatactcccgccattcagagaagaaaccaattgtccatattgcatcagacattgccgtcactgcgtcttttactggctcttctcgctaaccaaaccggtaaccccgcttattaaaagcattctgtaacaaagcgggaccaaagccatgacaaaaacgcgtaacaaaagtgtctataatcacggcagaaaagtccacattgattatttgcacggcgtcacactttgctatgccatagcatttttatccataagattagcggatcctacctgacgctttttatcgcaactctctactgtttctccatacccgtttttttgggctagcgaattcgagctcatgaacacgattaacatcgctaagaacgacttctctgacatcgaactggctgctatcccgttcaacactctggctgaccattacggtgagcgtttagctcgcgaacagttggcccttgagcatgagtcttacgagatgggtgaagcacgcttccgcaagatgtttgagcgtcaacttaaagctggtgaggttgcggataacgctgccgccaagcctctcatcactaccctactccctaagatgattgcacgcatcaacgactggtttgaggaagtgaaagctaagcgcggcaagcgcccgacagccttccagttcctgcaagaaatcaagccggaagccgtagcgtacatcaccattaagaccactctggcttgcctaaccagtgctgacaatacaaccgttcaggctgtagcaagcgcaatcggtcgggccattgaggacgaggctcgcttcggtcgtatccgtgaccttgaagctaagcacttcaagaaaaacgttgaggaacaactcaacaagcgcgtagggcacgtctacaagaaagcatttatgcaagttgtcgaggctgacatgctctctaagggtctactcggtggcgaggcgtggtcttcgtggcataaggaagactctattcatgtaggagtacgctgcatcgagatgctcattgagtcaaccggaatggttagcttacaccgccaaaatgctggcgtagtaggtcaagactctgagactatcgaactcgcacctgaatacgctgaggctatcgcaacccgtgcaggtgcgctggctggcatctctccgatgttccaaccttgcgtagttcctcctaagccgtggactggcattactggtggtggctattgggctaacggtcgtcgtcctctggcgctggtgcgtactcacagtaagaaagcactgatgcgctacgaagacgtttacatgcctgaggtgtacaaagcgattaacattgcgcaaaacaccgcatggaaaatcaacaagaaagtcctagcggtcgccaacgtaatcaccaagtggaagcattgtccggtcgaggacatccctgcgattgagcgtgaagaactcccgatgaaaccggaagacatcgacatgaatcctgaggctctcaccgcgtggaaacgtgctgccgctgctgtgtaccgcaaggacaaggctcgcaagtctcgccgtatcagccttgagttcatgcttgagcaagccaataagtttgctaaccataaggccatctggttcccttacaacatggactggcgcggtcgtgtttacgctgtgtcaatgttcaacccgcaaggtaacgatatgaccaaaggactgcttacgctggcgaaaggtaaaccaatcggtaaggaaggttactactggctgaaaatccacggtgcaaactgtgcgggtgtcgataaggttccgttccctgagcgcatcaagttcattgaggaaaaccacgagaacatcatggcttgcgctaagtctccactggagaacacttggtgggctgagcaagattctccgttctgcttccttgcgttctgctttgagtacgctggggtacagcaccacggcctgagctataactgctcccttccgctggcgtttgacgggtcttgctctggcatccagcacttctccgcgatgctccgagatgaggtaggtggtcgcgcggttaacttgcttcctagtgaaaccgttcaggacatctacgggattgttgctaagaaagtcaacgagattctacaagcagacgcaatcaatgggaccgataacgaagtagttaccgtgaccgatgagaacactggtgaaatctctgagaaagtcaagctgggcactaaggcactggctggtcaatggctggcttacggtgttactcgcagtgtgactaagcgttcagtcatgacgctggcttacgggtccaaagagttcggcttccgtcaacaagtgctggaagataccattcagccagctattgattccggcaagggtctgatgttcactcagccgaatcaggctgctggatacatggctaagctgatttgggaatctgtgagcgtgacggtggtagctgcggttgaagcaatgaactggcttaagtctgctgctaagctgctggctgctgaggtcaaagataagaagactggagagattcttcgcaagcgttgcgctgtgcattgggtaactcctgatggtttccctgtgtggcaggaatacaagaagcctattcagacgcgcttgaacctgatgttcctcggtcagttccgcttacagcctaccattaacaccaacaaagatagcgagattgatgcacacaaacaggagtctggtatcgctcctaactttgtacacagccaagacggtagccaccttcgtaagactgtagtgtgggcacacgagaagtacggaatcgaatcttttgcactgattcacgactccttcggtaccattccggctgacgctgcgaacctgttcaaagcagtgcgcgaaactatggttgacacatatgagtcttgtgatgtactggctgatttctacgaccagttcgctgaccagttgcacgagtctcaattggacaaaatgccagcacttccggctaaaggtaacttgaacctccgtgacatcttagagtcggacttcgcgttcgcgtaatctagagtcgacctgcaggcatgcaagcttggctgttttggcggatgagagaagattttcagcctgatacagattaaatcagaacgcagaagcggtctgataaaacagaatttgcctggcggcagtagcgcggtggtcccacctgaccccatgccgaactcagaagtgaaacgccgtagcgccgatggtagtgtggggtctccccatgcgagagtagggaactgccaggcatcaaataaaacgaaaggctcagtcgaaagactgaacgctctcctgagtaggacaaatccgccgccctagacctagggtacgggttttgctgcccgcaaacgggctgttctggtgttgctagtttgttatcagaatcgcagatccggcttcaggtttgccggctgaaagcgctatttcttccagaattgccatgattttttccccacgggaggcgtcactggctcccgtgttgtcggcagctttgattcgataagcagcatcgcctgtttcaggctgtctatgtgtgactgttgagctgtaacaagttgtctcaggtgttcaatttcatgttctagttgctttgttttactggtttcacctgttctattaggtgttacatgctgttcatctgttacattgtcgatctgttcatggtgaacagctttaaatgcaccaaaaactcgtaaaagctctgatgtatctatcttttttacaccgttttcatctgtgcatatggacagttttccctttgatatctaacggtgaacagttgttctacttttgtttgttagtcttgatgcttcactgatagatacaagagccataagaacctcagatccttccgtatttagccagtatgttctctagtgtggttcgttgtttttgcgtgagccatgagaacgaaccattgagatcatgcttactttgcatgtcactcaaaaattttgcctcaaaactggtgagctgaatttttgcagttaaagcatcgtgtagtgtttttcttagtccgttacgtaggtaggaatctgatgtaatggttgttggtattttgtcaccattcatttttatctggttgttctcaagttcggttacgagatccatttgtctatctagttcaacttggaaaatcaacgtatcagtcgggcggcctcgcttatcaaccaccaatttcatattgctgtaagtgtttaaatctttacttattggtttcaaaacccattggttaagccttttaaactcatggtagttattttcaagcattaacatgaacttaaattcatcaaggctaatctctatatttgccttgtgagttttcttttgtgttagttcttttaataaccactcataaatcctcatagagtatttgttttcaaaagacttaacatgttccagattatattttatgaatttttttaactggaaaagataaggcaatatctcttcactaaaaactaattctaatttttcgcttgagaacttggcatagtttgtccactggaaaatctcaaagcctttaaccaaaggattcctgatttccacagttctcgtcatcagctctctggttgctttagctaatacaccataagcattttccctactgatgttcatcatctgagcgtattggttataagtgaacgataccgtccgttctttccttgtagggttttcaatcgtggggttgagtagtgccacacagcataaaattagcttggtttcatgctccgttaagtcatagcgactaatcgctagttcatttgctttgaaaacaactaattcagacatacatctcaattggtctaggtgattttaatcactataccaattgagatgggctagtcaatgataattactagtccttttcctttgagttgtgggtatctgtaaattctgctagacctttgctggaaaacttgtaaattctgctagaccctctgtaaattccgctagacctttgtgtgttttttttgtttatattcaagtggttataatttatagaataaagaaagaataaaaaaagataaaaagaatagatcccagccctgtgtataactcactactttagtcagttccgcagtattacaaaaggatgtcgcaaacgctgtttgctcctctacaaaacagaccttaaaaccctaaaggcttaagtagcaccctcgcaagctcgggcaaatcgctgaatattccttttgtctccgaccatcaggcacctgagtcgctgtctttttcgtgacattcagttcgctgcgctcacggctctggcagtgaatgggggtaaatggcactacaggcgccttttatggattcatgcaaggaaactacccataatacaagaaaagcccgtcacgggcttctcagggcgttttatggcgggtctgctatgtggtgctatctgactttttgctgttcagcagttcctgccctctgattttccagtctgac

SEQ ID NO: 235 - DNA, 792 bp, Artificial sequence
  synthetic
  CDS (1)..(792): SmR gene
atgagggaagcggtgatcgccgaagtatcgactcaactatcagaggtagttggcgtcatcgagcgccatctcgaaccgacgttgctggccgtacatttgtacggctccgcagtggatggcggcctgaagccacacagtgatattgatttgctggttacggtgaccgtaaggcttgatgaaacaacgcggcgagctttgatcaacgaccttttggaaacttcggcttcccctggagagagcgagattctccgcgctgtagaagtcaccattgttgtgcacgacgacatcattccgtggcgttatccagctaagcgcgaactgcaatttggagaatggcagcgcaatgacattcttgcaggtatcttcgagccagccacgtacgacattgatctggctatcttgctgacaaaagcaagagaacatagcgttgccttggtaggtccagcggcggaggaactctttgatccggttcctgaacaggatctatttgaggcgctaaatgaaaccttaacgctatggaactcgccgcccgactgggctggcgatgagcgaaatgtagtgcttacgttgtcccgcatttggtacagcgcagtaaccggcaaaatcgcgccgaaggatgtcgctgccgactgggcaatggagcgcctgccggcccagtatcagcccgtcatacttgaagctagacaggcttatcttggacaagaagaagatcgcttggcctcgcgcgcagatcagttggaagaatttgtccactacgtgaaaggcgagatcaccaaggtagtcggcaaataa

SEQ ID NO: 236 - protein, 263 aa, Artificial sequence
  Synthetic Construct
MREAVIAEVSTQLSEVVGVIERHLEPTLLAVHLYGSAVDGGLKPHSDIDLLVTVTVRLDETTRRALINDLLETSASPGESEILRAVEVTIVVHDDIIPWRYPAKRELQFGEWQRNDILAGIFEPATYDIDLAILLTKAREHSVALVGPAAEELFDPVPEQDLFEALNETLTLWNSPPDWAGDERNVVLTLSRIWYSAVTGKIAPKDVAADWAMERLPAQYQPVILEARQAYLGQEEDRLASRADQLEEFVHYVKGEITKVVGK

SEQ ID NO: 237 - DNA, 28 bp, Artificial sequence
  synthetic
  promoter (1)..(28): SmR promoter
ttgacaggcacatttcgtaagctgtaat

SEQ ID NO: 238 - DNA, 2652 bp, Artificial sequence
  synthetic
  misc_feature (1)..(2653): T7 RNA polymerase
atgaacacgattaacatcgctaagaacgacttctctgacatcgaactggctgctatcccgttcaacactctggctgaccattacggtgagcgtttagctcgcgaacagttggcccttgagcatgagtcttacgagatgggtgaagcacgcttccgcaagatgtttgagcgtcaacttaaagctggtgaggttgcggataacgctgccgccaagcctctcatcactaccctactccctaagatgattgcacgcatcaacgactggtttgaggaagtgaaagctaagcgcggcaagcgcccgacagccttccagttcctgcaagaaatcaagccggaagccgtagcgtacatcaccattaagaccactctggcttgcctaaccagtgctgacaatacaaccgttcaggctgtagcaagcgcaatcggtcgggccattgaggacgaggctcgcttcggtcgtatccgtgaccttgaagctaagcacttcaagaaaaacgttgaggaacaactcaacaagcgcgtagggcacgtctacaagaaagcatttatgcaagttgtcgaggctgacatgctctctaagggtctactcggtggcgaggcgtggtcttcgtggcataaggaagactctattcatgtaggagtacgctgcatcgagatgctcattgagtcaaccggaatggttagcttacaccgccaaaatgctggcgtagtaggtcaagactctgagactatcgaactcgcacctgaatacgctgaggctatcgcaacccgtgcaggtgcgctggctggcatctctccgatgttccaaccttgcgtagttcctcctaagccgtggactggcattactggtggtggctattgggctaacggtcgtcgtcctctggcgctggtgcgtactcacagtaagaaagcactgatgcgctacgaagacgtttacatgcctgaggtgtacaaagcgattaacattgcgcaaaacaccgcatggaaaatcaacaagaaagtcctagcggtcgccaacgtaatcaccaagtggaagcattgtccggtcgaggacatccctgcgattgagcgtgaagaactcccgatgaaaccggaagacatcgacatgaatcctgaggctctcaccgcgtggaaacgtgctgccgctgctgtgtaccgcaaggacaaggctcgcaagtctcgccgtatcagccttgagttcatgcttgagcaagccaataagtttgctaaccataaggccatctggttcccttacaacatggactggcgcggtcgtgtttacgctgtgtcaatgttcaacccgcaaggtaacgatatgaccaaaggactgcttacgctggcgaaaggtaaaccaatcggtaaggaaggttactactggctgaaaatccacggtgcaaactgtgcgggtgtcgataaggttccgttccctgagcgcatcaagttcattgaggaaaaccacgagaacatcatggcttgcgctaagtctccactggagaacacttggtgggctgagcaagattctccgttctgcttccttgcgttctgctttgagtacgctggggtacagcaccacggcctgagctataactgctcccttccgctggcgtttgacgggtcttgctctggcatccagcacttctccgcgatgctccgagatgaggtaggtggtcgcgcggttaacttgcttcctagtgaaaccgttcaggacatctacgggattgttgctaagaaagtcaacgagattctacaagcagacgcaatcaatgggaccgataacgaagtagttaccgtgaccgatgagaacactggtgaaatctctgagaaagtcaagctgggcactaaggcactggctggtcaatggctggcttacggtgttactcgcagtgtgactaagcgttcagtcatgacgctggcttacgggtccaaagagttcggcttccgtcaacaagtgctggaagataccattcagccagctattgattccggcaagggtctgatgttcactcagccgaatcaggctgctggatacatggctaagctgatttgggaatctgtgagcgtgacggtggtagctgcggttgaagcaatgaactggcttaagtctgctgctaagctgctggctgctgaggtcaaagataagaagactggagagattcttcgcaagcgttgcgctgtgcattgggtaactcctgatggtttccctgtgtggcaggaatacaagaagcctattcagacgcgcttgaacctgatgttcctcggtcagttccgcttacagcctaccattaacaccaacaaagatagcgagattgatgcacacaaacaggagtctggtatcgctcctaactttgtacacagccaagacggtagccaccttcgtaagactgtagtgtgggcacacgagaagtacggaatcgaatcttttgcactgattcacgactccttcggtaccattccggctgacgctgcgaacctgttcaaagcagtgcgcgaaactatggttgacacatatgagtcttgtgatgtactggctgatttctacgaccagttcgctgaccagttgcacgagtctcaattggacaaaatgccagcacttccggctaaaggtaacttgaacctccgtgacatcttagagtcggacttcgcgttcgcgtaa

SEQ ID NO: 239 - DNA, 9288 bp, Artificial sequence
  synthetic
  misc_feature (1)..(9288): pSpCas9(BB)-2A-GFP plasmid
gagggcctatttcccatgattccttcatatttgcatatacgatacaaggctgttagagagataattggaattaatttgactgtaaacacaaagatattagtacaaaatacgtgacgtagaaagtaataatttcttgggtagtttgcagttttaaaattatgttttaaaatggactatcatatgcttaccgtaacttgaaagtatttcgatttcttggctttatatatcttgtggaaaggacgaaacaccgggtcttcgagaagacctgttttagagctagaaatagcaagttaaaataaggctagtccgttatcaacttgaaaaagtggcaccgagtcggtgcttttttgttttagagctagaaatagcaagttaaaataaggctagtccgtttttagcgcgtgcgccaattctgcagacaaatggctctagaggtacccgttacataacttacggtaaatggcccgcctggctgaccgcccaacgacccccgcccattgacgtcaatagtaacgccaatagggactttccattgacgtcaatgggtggagtatttacggtaaactgcccacttggcagtacatcaagtgtatcatatgccaagtacgccccctattgacgtcaatgacggtaaatggcccgcctggcattgtgcccagtacatgaccttatgggactttcctacttggcagtacatctacgtattagtcatcgctattaccatggtcgaggtgagccccacgttctgcttcactctccccatctcccccccctccccacccccaattttgtatttatttattttttaattattttgtgcagcgatgggggcggggggggggggggggcgcgcgccgggggggggggggggggggggggggggggggggggcgaggcggagaggtgcggcggcagccaatcagagcggcgcgctccgaaagtttccttttatggcgaggcggcggcggcggcggccctataaaaagcgaagcgcgcggcgggcgggagtcgctgcgcgctgccttcgccccgtgccccgctccgccgccgcctcgcgccgcccgccccggctctgactgaccgcgttactcccacaggtgagcgggcgggacggcccttctcctccgggctgtaattagctgagcaagaggtaagggtttaagggatggttggttggtggggtattaatgtttaattacctggagcacctgcctgaaatcactttttttcaggttggaccggtgccaccatggactataaggaccacgacggagactacaaggatcatgatattgattacaaagacgatgacgataagatggccccaaagaagaagcggaaggtcggtatccacggagtcccagcagccgacaagaagtacagcatcggcctggacatcggcaccaactctgtgggctgggccgtgatcaccgacgagtacaaggtgcccagcaagaaattcaaggtgctgggcaacaccgaccggcacagcatcaagaagaacctgatcggagccctgctgttcgacagcggcgaaacagccgaggccacccggctgaagagaaccgccagaagaagatacaccagacggaagaaccggatctgctatctgcaagagatcttcagcaacgagatggccaaggtggacgacagcttcttccacagactggaagagtccttcctggtggaagaggataagaagcacgagcggcaccccatcttcggcaacatcgtggacgaggtggcctaccacgagaagtaccccaccatctaccacctgagaaagaaactggtggacagcaccgacaaggccgacctgcggctgatctatctggccctggcccacatgatcaagttccggggccacttcctgatcgagggcgacctgaaccccgacaacagcgacgtggacaagctgttcatccagctggtgcagacctacaaccagctgttcgaggaaaaccccatcaacgccagcggcgtggacgccaaggccatcctgtctgccagactgagcaagagcagacggctggaaaatctgatcgcccagctgcccggcgagaagaagaatggcctgttcggaaacctgattgccctgagcctgggcctgacccccaacttcaagagcaacttcgacctggccgaggatgccaaactgcagctgagcaaggacacctacgacgacgacctggacaacctgctggcccagatcggcgaccagtacgccgacctgtttctggccgccaagaacctgtccgacgccatcctgctgagcgacatcctgagagtgaacaccgagatcaccaaggcccccctgagcgcctctatgatcaagagatacgacgagcaccaccaggacctgaccctgctgaaagctctcgtgcggcagcagctgcctgagaagtacaaagagattttcttcgaccagagcaagaacggctacgccggctacattgacggcggagccagccaggaagagttctacaagttcatcaagcccatcctggaaaagatggacggcaccgaggaactgctcgtgaagctgaacagagaggacctgctgcggaagcagcggaccttcgacaacggcagcatcccccaccagatccacctgggagagctgcacgccattctgcggcggcaggaagatttttacccattcctgaaggacaaccgggaaaagatcgagaagatcctgaccttccgcatcccctactacgtgggccctctggccaggggaaacagcagattcgcctggatgaccagaaagagcgaggaaaccatcaccccctggaacttcgaggaagtggtggacaagggcgcttccgcccagagcttcatcgagcggatgaccaacttcgataagaacctgcccaacgagaaggtgctgcccaagcacagcctgctgtacgagtacttcaccgtgtataacgagctgaccaaagtgaaatacgtgaccgagggaatgagaaagcccgccttcctgagcggcgagcagaaaaaggccatcgtggacctgctgttcaagaccaaccggaaagtgaccgtgaagcagctgaaagaggactacttcaagaaaatcgagtgcttcgactccgtggaaatctccggcgtggaagatcggttcaacgcctccctgggcacataccacgatctgctgaaaattatcaaggacaaggacttcctggacaatgaggaaaacgaggacattctggaagatatcgtgctgaccctgacactgtttgaggacagagagatgatcgaggaacggctgaaaacctatgcccacctgttcgacgacaaagtgatgaagcagctgaagcggcggagatacaccggctggggcaggctgagccggaagctgatcaacggcatccgggacaagcagtccggcaagacaatcctggatttcctgaagtccgacggcttcgccaacagaaacttcatgcagctgatccacgacgacagcctgacctttaaagaggacatccagaaagcccaggtgtccggccagggcgatagcctgcacgagcacattgccaatctggccggcagccccgccattaagaagggcatcctgcagacagtgaaggtggtggacgagctcgtgaaagtgatgggccggcacaagcccgagaacatcgtgatcgaaatggccagagagaaccagaccacccagaagggacagaagaacagccgcgagagaatgaagcggatcgaagagggcatcaaagagctgggcagccagatcctgaaagaacaccccgtggaaaacacccagctgcagaacgagaagctgtacctgtactacctgcagaatgggcgggatatgtacgtggaccaggaactggacatcaaccggctgtccgactacgatgtggaccatatcgtgcctcagagctttctgaaggacgactccatcgacaacaaggtgctgaccagaagcgacaagaaccggggcaagagcgacaacgtgccctccgaagaggtcgtgaagaagatgaagaactactggcggcagctgctgaacgccaagctgattacccagagaaagttcgacaatctgaccaaggccgagagaggcggcctgagcgaactggataaggccggcttcatcaagagacagctggtggaaacccggcagatcacaaagcacgtggcacagatcctggactcccggatgaacactaagtacgacgagaatgacaagctgatccgggaagtgaaagtgatcaccctgaagtccaagctggtgtccgatttccggaaggatttccagttttacaaagtgcgcgagatcaacaactaccaccacgcccacgacgcctacctgaacgccgtcgtgggaaccgccctgatcaaaaagtaccctaagctggaaagcgagttcgtgtacggcgactacaaggtgtacgacgtgcggaagatgatcgccaagagcgagcaggaaatcggcaaggctaccgccaagtacttcttctacagcaacatcatgaactttttcaagaccgagattaccctggccaacggcgagatccggaagcggcctctgatcgagacaaacggcgaaaccggggagatcgtgtgggataagggccgggattttgccaccgtgcggaaagtgctgagcatgccccaagtgaatatcgtgaaaaagaccgaggtgcagacaggcggcttcagcaaagagtctatcctgcccaagaggaacagcgataagctgatcgccagaaagaaggactgggaccctaagaagtacggcggcttcgacagccccaccgtggcctattctgtgctggtggtggccaaagtggaaaagggcaagtccaagaaactgaagagtgtgaaagagctgctggggatcaccatcatggaaagaagcagcttcgagaagaatcccatcgactttctggaagccaagggctacaaagaagtgaaaaaggacctgatcatcaagctgcctaagtactccctgttcgagctggaaaacggccggaagagaatgctggcctctgccggcgaactgcagaagggaaacgaactggccctgccctccaaatatgtgaacttcctgtacctggccagccactatgagaagctgaagggctcccccgaggataatgagcagaaacagctgtttgtggaacagcacaagcactacctggacgagatcatcgagcagatcagcgagttctccaagagagtgatcctggccgacgctaatctggacaaagtgctgtccgcctacaacaagcaccgggataagcccatcagagagcaggccgagaatatcatccacctgtttaccctgaccaatctgggagcccctgccgccttcaagtactttgacaccaccatcgaccggaagaggtacaccagcaccaaagaggtgctggacgccaccctgatccaccagagcatcaccggcctgtacgagacacggatcgacctgtctcagctgggaggcgacaaaaggccggcggccacgaaaaaggccggccaggcaaaaaagaaaaaggaattcggcagtggagagggcagaggaagtctgctaacatgcggtgacgtcgaggagaatcctggcccagtgagcaagggcgaggagctgttcaccggggtggtgcccatcctggtcgagctggacggcgacgtaaacggccacaagttcagcgtgtccggcgagggcgagggcgatgccacctacggcaagctgaccctgaagttcatctgcaccaccggcaagctgcccgtgccctggcccaccctcgtgaccaccctgacctacggcgtgcagtgcttcagccgctaccccgaccacatgaagcagcacgacttcttcaagtccgccatgcccgaaggctacgtccaggagcgcaccatcttcttcaaggacgacggcaactacaagacccgcgccgaggtgaagttcgagggcgacaccctggtgaaccgcatcgagctgaagggcatcgacttcaaggaggacggcaacatcctggggcacaagctggagtacaactacaacagccacaacgtctatatcatggccgacaagcagaagaacggcatcaaggtgaacttcaagatccgccacaacatcgaggacggcagcgtgcagctcgccgaccactaccagcagaacacccccatcggcgacggccccgtgctgctgcccgacaaccactacctgagcacccagtccgccctgagcaaagaccccaacgagaagcgcgatcacatggtcctgctggagttcgtgaccgccgccgggatcactctcggcatggacgagctgtacaaggaattctaactagagctcgctgatcagcctcgactgtgccttctagttgccagccatctgttgtttgcccctcccccgtgccttccttgaccctggaaggtgccactcccactgtcctttcctaataaaatgaggaaattgcatcgcattgtctgagtaggtgtcattctattctggggggtggggtggggcaggacagcaagggggaggattgggaagagaatagcaggcatgctggggagcggccgcaggaacccctagtgatggagttggccactccctctctgcgcgctcgctcgctcactgaggccgggcgaccaaaggtcgcccgacgcccgggctttgcccgggcggcctcagtgagcgagcgagcgcgcagctgcctgcaggggcgcctgatgcggtattttctccttacgcatctgtgcggtatttcacaccgcatacgtcaaagcaaccatagtacgcgccctgtagcggcgcattaagcgcggcgggtgtggtggttacgcgcagcgtgaccgctacacttgccagcgccttagcgcccgctcctttcgctttcttcccttcctttctcgccacgttcgccggctttccccgtcaagctctaaatcgggggctccctttagggttccgatttagtgctttacggcacctcgaccccaaaaaacttgatttgggtgatggttcacgtagtgggccatcgccctgatagacggtttttcgccctttgacgttggagtccacgttctttaatagtggactcttgttccaaactggaacaacactcaactctatctcgggctattcttttgatttataagggattttgccgatttcggtctattggttaaaaaatgagctgatttaacaaaaatttaacgcgaattttaacaaaatattaacgtttacaattttatggtgcactctcagtacaatctgctctgatgccgcatagttaagccagccccgacacccgccaacacccgctgacgcgccctgacgggcttgtctgctcccggcatccgcttacagacaagctgtgaccgtctccgggagctgcatgtgtcagaggttttcaccgtcatcaccgaaacgcgcgagacgaaagggcctcgtgatacgcctatttttataggttaatgtcatgataataatggtttcttagacgtcaggtggcacttttcggggaaatgtgcgcggaacccctatttgtttatttttctaaatacattcaaatatgtatccgctcatgagacaataaccctgataaatgcttcaataatattgaaaaaggaagagtatgagtattcaacatttccgtgtcgcccttattcccttttttgcggcattttgccttcctgtttttgctcacccagaaacgctggtgaaagtaaaagatgctgaagatcagttgggtgcacgagtgggttacatcgaactggatctcaacagcggtaagatccttgagagttttcgccccgaagaacgttttccaatgatgagcacttttaaagttctgctatgtggcgcggtattatcccgtattgacgccgggcaagagcaactcggtcgccgcatacactattctcagaatgacttggttgagtactcaccagtcacagaaaagcatcttacggatggcatgacagtaagagaattatgcagtgctgccataaccatgagtgataacactgcggccaacttacttctgacaacgatcggaggaccgaaggagctaaccgcttttttgcacaacatgggggatcatgtaactcgccttgatcgttgggaaccggagctgaatgaagccataccaaacgacgagcgtgacaccacgatgcctgtagcaatggcaacaacgttgcgcaaactattaactggcgaactacttactctagcttcccggcaacaattaatagactggatggaggcggataaagttgcaggaccacttctgcgctcggcccttccggctggctggtttattgctgataaatctggagccggtgagcgtggaagccgcggtatcattgcagcactggggccagatggtaagccctcccgtatcgtagttatctacacgacggggagtcaggcaactatggatgaacgaaatagacagatcgctgagataggtgcctcactgattaagcattggtaactgtcagaccaagtttactcatatatactttagattgatttaaaacttcatttttaatttaaaaggatctaggtgaagatcctttttgataatctcatgaccaaaatcccttaacgtgagttttcgttccactgagcgtcagaccccgtagaaaagatcaaaggatcttcttgagatcctttttttctgcgcgtaatctgctgcttgcaaacaaaaaaaccaccgctaccagcggtggtttgtttgccggatcaagagctaccaactctttttccgaaggtaactggcttcagcagagcgcagataccaaatactgttcttctagtgtagccgtagttaggccaccacttcaagaactctgtagcaccgcctacatacctcgctctgctaatcctgttaccagtggctgctgccagtggcgataagtcgtgtcttaccgggttggactcaagacgatagttaccggataaggcgcagcggtcgggctgaacggggggttcgtgcacacagcccagcttggagcgaacgacctacaccgaactgagatacctacagcgtgagctatgagaaagcgccacgcttcccgaagggagaaaggcggacaggtatccggtaagcggcagggtcggaacaggagagcgcacgagggagcttccagggggaaacgcctggtatctttatagtcctgtcgggtttcgccacctctgacttgagcgtcgatttttgtgatgctcgtcaggggggcggagcctatggaaaaacgccagcaacgcggcctttttacggttcctggccttttgctggccttttgctcacatgt

SEQ ID NO: 240 - DNA, 2579 bp, Artificial sequence
  synthetic
  misc_feature (1)..(2579): pUC57-kan plasmid
tcgcgcgtttcggtgatgacggtgaaaacctctgacacatgcagctcccggagacggtcacagcttgtctgtaagcggatgccgggagcagacaagcccgtcagggcgcgtcagcgggtgttggcgggtgtcggggctggcttaactatgcggcatcagagcagattgtactgagagtgcaccatatgcggtgtgaaataccgcacagatgcgtaaggagaaaataccgcatcaggcgccattcgccattcaggctgcgcaactgttgggaagggcgatcggtgcgggcctcttcgctattacgccagctggcgaaagggggatgtgctgcaaggcgattaagttgggtaacgccagggttttcccagtcacgacgttgtaaaacgacggccagagaattcgagctcggtacctcgcgaatacatctagatatcggatcccgggcccgtcgactgcagaggcctgcatgcaagcttggtgtaatcatggtcatagctgtttcctgtgtgaaattgttatccgctcacaattccacacaacatacgagccggaagcataaagtgtaaagcctggggtgcctaatgagtgagctaactcacattaattgcgttgcgctcactgcccgctttccagtcgggaaacctgtcgtgccagctgcattaatgaatcggccaacgcgcggggagaggcggtttgcgtattgggcgctcttccgcttcctcgctcactgactcgctgcgctcggtcgttcggctgcggcgagcggtatcagctcactcaaaggcggtaatacggttatccacagaatcaggggataacgcaggaaagaacatgtgagcaaaaggccagcaaaaggccaggaaccgtaaaaaggccgcgttgctggcgtttttccataggctccgcccccctgacgagcatcacaaaaatcgacgctcaagtcagaggtggcgaaacccgacaggactataaagataccaggcgtttccccctggaagctccctcgtgcgctctcctgttccgaccctgccgcttaccggatacctgtccgcctttctcccttcgggaagcgtggcgctttctcatagctcacgctgtaggtatctcagttcggtgtaggtcgttcgctccaagctgggctgtgtgcacgaaccccccgttcagcccgaccgctgcgccttatccggtaactatcgtcttgagtccaacccggtaagacacgacttatcgccactggcagcagccactggtaacaggattagcagagcgaggtatgtaggcggtgctacagagttcttgaagtggtggcctaactacggctacactagaagaacagtatttggtatctgcgctctgctgaagccagttaccttcggaaaaagagttggtagctcttgatccggcaaacaaaccaccgctggtagcggtggtttttttgtttgcaagcagcagattacgcgcagaaaaaaaggatctcaagaagatcctttgatcttttctacggggtctgacgctcagtggaacgaaaactcacgttaagggattttggtcatgagattatcaaaaaggatcttcacctagatccttttaaattaaaaatgaagttttaaatcaagcccaatctgaataatgttacaaccaattaaccaattctgattagaaaaactcatcgagcatcaaatgaaactgcaatttattcatatcaggattatcaataccatatttttgaaaaagccgtttctgtaatgaaggagaaaactcaccgaggcagttccataggatggcaagatcctggtatcggtctgcgattccgactcgtccaacatcaatacaacctattaatttcccctcgtcaaaaataaggttatcaagtgagaaatcaccatgagtgacgactgaatccggtgagaatggcaaaagtttatgcatttctttccagacttgttcaacaggccagccattacgctcgtcatcaaaatcactcgcatcaaccaaaccgttattcattcgtgattgcgcctgagcgagacgaaatacgcgatcgctgttaaaaggacaattacaaacaggaatcgaatgcaaccggcgcaggaacactgccagcgcatcaacaatattttcacctgaatcaggatattcttctaatacctggaatgctgtttttccggggatcgcagtggtgagtaaccatgcatcatcaggagtacggataaaatgcttgatggtcggaagaggcataaattccgtcagccagtttagtctgaccatctcatctgtaacatcattggcaacgctacctttgccatgtttcagaaacaactctggcgcatcgggcttcccatacaagcgatagattgtcgcacctgattgcccgacattatcgcgagcccatttatacccatataaatcagcatccatgttggaatttaatcgcggcctcgacgtttcccgttgaatatggctcataacaccccttgtattactgtttatgtaagcagacagttttattgttcatgatgatatatttttatcttgtgcaatgtaacatcagagattttgagacacgggccagagctgca

SEQ ID NO: 241 - DNA, 348 bp, Artificial sequence
  synthetic
  CDS (1)..(348): lacZ-alpha
atgaccatgattacaccaagcttgcatgcaggcctctgcagtcgacgggcccgggatccgatatctagatgtattcgcgaggtaccgagctcgaattctctggccgtcgttttacaacgtcgtgactgggaaaaccctggcgttacccaacttaatcgccttgcagcacatccccctttcgccagctggcgtaatagcgaagaggcccgcaccgatcgcccttcccaacagttgcgcagcctgaatggcgaatggcgcctgatgcggtattttctccttacgcatctgtgcggtatttcacaccgcatatggtgcactctcagtacaatctgctctgatgccgcatag

SEQ ID NO: 242 - protein, 115 aa, Artificial sequence
  Synthetic Construct
MTMITPSLHAGLCSRRARDPISRCIREVPSSNSLAVVLQRRDWENPGVTQLNRLAAHPPFASWRNSEEARTDRPSQQLRSLNGEWRLMRYFLLTHLCGISHRIWCTLSTICSDAA

SEQ ID NO: 243 - DNA, 17 bp, Artificial sequence
  synthetic
  misc_feature (1)..(17): lac operator
ttgttatccgctcacaa

SEQ ID NO: 244 - DNA, 31 bp, Artificial sequence
  synthetic
  promoter (1)..(31): lac promoter
tttacactttatgcttccggctcgtatgttg

SEQ ID NO: 245 - DNA, 22 bp, Artificial sequence
  synthetic
  misc_feature (1)..(22): CAP binding site
atgagtgagctaactcacatta

SEQ ID NO: 246 - DNA, 3044 bp, E. coli Nissle 1917
  misc_feature (1)..(3040): Tn7::GFP
aatgtctcctgggaggattcataaagcattgtttgttggctacgagaagcaaaataggacaaacaggtgacagttatatgtaaggtttatgacagttttatgacagagagagaatgtcttcagtctgatttaaataagcgttgatattcagttaattacaaatattaataacgaagagatgacagaaaaattttcattctgtgacagagaaaaagtagccgaagatgacggtttgtcacatggagttggcaggatgtttgattaaaaacataacaggaagaaaaatgccccgctgtgggcggacaaaatagttgggaactgggaggggtggaaatggagtttttaaggattatttagggaagagtgacaaaatagatgggaactgggtgtagcgtcgtaagctaatacgaaaattaaaaatgacaaaatagtttggaactagatttcacttatctggttggtcgacactagtattaccctgttatccctagatttaaatgatatcggatcctagtaagccacgttttaattcttcacctcgagtttacacctagctcagtcctaggtattatgctagctactagaggaattcattaaagaggagaaaggtaatgagcaaaggagaagaacttttcactggagttgtcccaattcttgttgaattagatggtgatgttaatgggcacaaattttctgtcagtggagagggtgaaggtgatgctacatacggaaaactcacccttaaatttatttgcactactggaaaactacctgttccatggccaacacttgtcactactctgacctatggtgttcaatgcttttcccgttatccggatcacatgaaacggcatgactttttcaagagtgccatgcccgaaggttatgtacaggaacgcactatatctttcaaagatgacgggaactacaagacgcgtgctgaagtcaagtttgaaggtgatacccttgttaatcgtatcgagttaaagggtattgattttaaagaagatggaaacattctcggacacaaactagagtacaactataactcacacaatgtatacatcacggcagacaaacaaaagaatggaatcaaagctaacttcaaaattcgccacaacattgaagatggttccgttcaactagcagaccattatcaacaaaatactccaattggcgatggccctgtccttttaccagacaaccattacctgtcgacacaatctgccctttcgaaagatcccaacgaaaagcgtgaccacatggtccttcttgagtttgtaactgctgctgggattacacatggcatggatgagctctacaaatgatagaggcatcaaataaaacgaaaggctcagtcgaaagactgggcctttcgttttatttgatgcctggttattattatttgtacagctcatccatgccaccggtagaatgacgaccctccgcgcgctcatattgctctacgatcgtattggtgagaatccaggggtccccaataattacgatttaaatttgacagcttatcatcgataaactgtaatgcggtagtttatcacagttaaattgctaacgcagtcaggcaccgtgtatgaaatctaacaatgcgctcatcgtcatcctcggcaccgtcaccctggatgctgtaggcataggcttggttatgccggtactgccgggcctcttgcgggatatcgtccattccgacagcatcgccagtcacttgcgttgatgcaatttctatgcgcacccgttctcggagcactgtccgaccgctttggccgccgcccagtcctgctcgcttcgctacttggagccactatcgactacgcgatcatggcgaccacacccgtcctgtggattctctacgccggacgcatcgtggccggcatcaccggcgccacaggtgcggttgctggcgcctatatcgccgacatcaccgatggggaagatcgggctcgccacttcgggctcatgagcgcttgtttcggcgtgggtatggtggcaggccccgtggccgggggactgttgggcgccatctccctgcacgcaccattccttgcggcggcggtgctcaacggcctcaacctactactgggctgcttcctaatgcaggagtcgcataagggagagcgccgtccgatgcccttgagagccttcaacccagtcagctccttccggtgggcgcggggcatgaccattgtggccgcacttatgactgtcttctttatcatgcaactcgtaggacaggtgccggcagcgctctgggtcattttcggcgaggaccgctttcgctggagcgcgacgatgatcggcctgtcgcttgcggtattcggaatcttgcacgccctcgctcaagccttcgtcactggtcccgccaccaaacgtttcggcgagaagcaggccattatcgccggcatggcggccgacgcgctgggctacgtcttgctggcgttcgcgacgcgaggctggatggccttccccattatgattcttctcgcttccggcggcatcgggatgcccgcgttgcaggccatgctgtccaggcaggtagatgacgaccatcagggacagcttcaaggatcgctcgcggctcttaccagcctaacttcgatcactggaccgctgatcgtcacggcgatttatgccgcctcggcgagcacatggaacgggttggcatggattgtaggcgccgccctataccttgtctgcctccccgcgttgcgtcgcggtgcatggagccgggccacctcgacctgagacaattgtccttttccgctgcataacctcgagcacctaggaggcgcgccacggccgcgtcgaccccacgcccctctttaatacgacgggcaatttgcacttcagaaaatgaagagtttgctttagccataacaaaagtccagtatgctttttcacagcataactggactgatttcagtttacaactattctgtctagtttaagactttattgtcatagtttagatctattttgttcagtttaagactttattgtccgcccacattacgcagggcatccattta

SEQ ID NO: 247 - DNA, 879 bp, E. coli
  CDS (1)..(879): dapA encoding 4-Hydroxy-tetrahydrodipicolinate synthase
atgttcacgggaagtattgtcgcgattgttactccgatggatgaaaaaggtaatgtctgtcgggctagcttgaaaaaactgattgattatcatgtcgccagcggtacttcggcgatcgtttctgttggcaccactggcgagtccgctaccttaaatcatgacgaacatgctgatgtggtgatgatgacgctggagctggctgacgggcgcattccggtgattgccgggaccggtgctaacgctactgcggaagccattagcctgacgcagcgcttcaatgacagcggtatcgtcggctgcctgacggtaaccccttactacaatcgtccgtcgcaagaaggtttgtatcagcatttcaaagccatcgctgaacatactgacctgccgcaaattctgtataatgtgccgtcccgtactggctgcgatctgctcccggaaacggtgggccgtctggcgaaagtaaaaaatattatcggaatcaaagaggcaacagggaacttaacgcgtgtaaaccagatcaaagagctggtttcagatgattttgttctgctgagcggcgatgatgcgagcgcgctggacttcatgcaattaggcggtcatggggttatttccgttacggctaacgtcgcagcgcgtgatatggcccagatgtgcaaactggcagcagaagggcattttgccgaggcacgcgttattaatcagcgtctgatgccattacacaacaaactatttgtcgaacccaatccaatcccggtgaaatgggcatgtaaggaactgggtcttgtggcgaccgatacgctgcgcctgccaatgacaccaatcaccgacagtggtcgtgagacggtcagagcggcgcttaagcatgccggtttgctgtaa

SEQ ID NO: 248 - protein, 292 aa, E. coli
MFTGSIVAIVTPMDEKGNVCRASLKKLIDYHVASGTSAIVSVGTTGESATLNHDEHADVVMMTLELADGRIPVIAGTGANATAEAISLTQRFNDSGIVGCLTVTPYYNRPSQEGLYQHFKAIAEHTDLPQILYNVPSRTGCDLLPETVGRLAKVKNIIGIKEATGNLTRVNQIKELVSDDFVLLSGDDASALDFMQLGGHGVISVTANVAARDMAQMCKLAAEGHFAEARVINQRLMPLHNKLFVEPNPIPVKWACKELGLVATDTLRLPMTPITDSGRETVRAALKHAGLL

SEQ ID NO: 249 - DNA, 8312 bp, Artificial sequence
  synthetic
  misc_feature (1)..(8312): plasmid pGB2?inv-hly
  misc_feature (1)..(14): n means any nucleic acid (A, T, C or G)
  misc_feature (1236)..(1241): n means any nucleic acid (A, T, C or G)
  misc_feature (2188)..(2199): n means any nucleic acid (A, T, C or G)
  misc_feature (8310)..(8312): n means any nucleic acid (A, T, C or G)
nnnnnnnnnnnnnngagttatacacagggctgggatctattctttttatctttttttattctttctttattctataaattataaccacttgaatataaacaaaaaaaacacacaaaggtctagcggaatttacagagggtctagcagaatttacaagttttccagcaaaggtctagcagaatttacagatacccacaactcaaaggaaaaggactagtaattatcattgactagcccatctcaattggtatagtgattaaaatcacctagaccaattgagatgtatgtctgaattagttgttttcaaagcaaatgaactagcgattagtcgctatgacttaacggagcatgaaaccaagctaattttatgctgtgtggcactactcaaccccacgattgaaaaccctacaaggaaagaacggacggtatcgttcacttataaccaatacgctcagatgatgaacatcagtagggaaaatgcttatggtgtattagctaaagcaaccagagagctgatgacgagaactgtggaaatcaggaatcctttggttaaaggctttgagattttccagtggacaaactatgccaagttctcaagcgaaaaattagaattagtttttagtgaagagatattgccttatcttttccagttaaaaaaattcataaaatataatctggaacatgttaagtcttttgaaaacaaatactctatgaggatttatgagtggttattaaaagaactaacacaaaagaaaactcacaaggcaaatatagagattagccttgatgaatttaagttcatgttaatgcttgaaaataactaccatgagtttaaaaggcttaaccaatgggttttgaaaccaataagtaaagatttaaacacttacagcaatatgaaattggtggttgataagcgaggccgcccgactgatacgttgattttccaagttgaactagatagacaaatggatctcgtaaccgaacttgagaacaaccagataaaaatgaatggtgacaaaataccaacaaccattacatcagattcctacctacataacggactaagaaaaacactacacgatgctttaactgcaaaaattcagctcaccagttttgaggcaaaatttttgagtgacatgcaaagtaagtatgatctcaatggttcgttctcatggctcacgcaaaaacaacgaaccacactagagaacatactggctaaatacggaaggatctgannnnnncaagtggcagcaacggattcgcaaacctgtcacgccttttgtaccaaaagccgcgccaggtttgcgatccgctgtgccaggcgttagacatcatgataaacacagtgcccgccgagatttcggtacagttatcacaggcactcaacgtcatcgagcatcatctgggatcgacgttgctggccatgcatttgtatggctctgcactcgacggtggcctgaagccatacagtgatattgatttgctggttactgtgaccgcacggctcgatgagagtgtgcggcaagctctgttcgtcgatctcttgggggtttccgttttccctggtcaaagcagagttctccgcgccttggaagttaccattgtcgtgcacagtgacatcgttccttggcgctatccggacagacgggaactgcaattcggggagtggcagcgcaaagacattcttgcgggcatcttcgagcctgcgacaaccgatgttgatctagccattctgctaacaaaagcaaggcaacatagccttgccttggccggttcggctggggaagatttcttcaacccagtcccggaaagcgatctattcaaggcactggccgacaccctgaaactatggaactcacagccggattggataggtgacgagcggaatgtagtgcttactttgtctcgtatttggtacagcgcagcaaccggcaagatcgcgccgaaggatgttgccgccaactgggtaatggagcgtttgccagttcaacatcagcccgtgctgcttgaagcccggcaggcttatcttggacaaggagaagattgcttggcttcgctcacggatcagttagaggcgtttgttcacttcgtgaagcatgaagccactaaactgcttggtgccacgccaatgatgtctaacaattcattcaagccgacgccgcttcgcggcgcggcttaattcaggcgnnnnnnnnnnnnaagcttctgcagtcatcaaggcaaccatcaggattaatgcggatattgcggagtaacacttcagactgaaagtagaaataaaaaccgcagcagacaactgacaacatcaaatgaagggggcttattctaattgatattatttatatgataatagttcattttgtattttgtttttttgatattctcacctgcttagttacaataaatcaattctatcgctgtatggtatagactgttttattatatattttgaatatttttaatctgcccagtctggttttttaaaaaagtgctatcctcttaatgtctttactaaattagaaaacaagtttcactttcaactattgcatctttaattaatggtcaaggtgatttcaaatgctcgtttgtggccagttatacctcaaataactcaagttgttgagcacagccaacgcacatgcagtttgacgtatgacaggtatgctttatttcatttaaattatgatggttttccagccaatcagtgagtttctcttgataaggaatgcgggaatgtctatgtattttaataaaataatttcatttaatattatttcacgaatagttatttgtatctttttgatatgtggaatgttcatggctggggcttcagaaaaatatgatgctaacgcaccgcaacaggtccagccttattctgtctcttcatctgcatttgaaaatctccatcctaataatgaaatggagagttcaatcaatcccttttccgcatcggatacagaaagaaatgctgcaataatagatcgcgccaataaggagcaggagactgaagcggtgaataagatgataagcaccggggccaggttagctgcatcaggcagggcatctgatgttgctcactcaatggtgggcgatgcggttaatcaagaaatcaaacagtggttaaatcgattcggtacggctcaagttaatctgaattttgacaaaaatttttcgctaaaagaaagctctcttgattggctggctccttggtatgactctgcttcattcctcttttttagtcagttaggtattcgcaataaagacagccgcaacacacttaaccttggcgtcgggatacgtacattggagaacggttggctgtacggacttaatactttttatgataatgatttgaccggccacaaccaccgtatcggtcttggtgccgaggcctggaccgattatttacagttggctgccaatgggtattttcgcctcaatggatggcactcgtcgcgtgatttctccgactataaagagcgcccagccactgggggggatttgcgcgcgaatgcttatttacctgcactcccacaactgggggggaagttgatgtatgagcaatacaccggtgagcgtgttgctttatttggtaaagataatctgcaacgcaacccttatgccgtgactgccgggatcaattacacccccgtgcctctactcactgtcggggtagatcagcgtatggggaaaagcagtaagcatgaaacacagtggaacctccaaatgaactatcgcctgggcgagagttttcagtcgcaacttagcccttcagcggtggcaggaacacgtctactggcggagagccgctataaccttgtcgatcgtaacaataatatcgtgttggagtatcagaaacagcaggtggttaaactgacattatcgccagcaactatctccggcctgccgggtcaggtttatcaggtgaacgcacaagtacaaggggcatctgctgtaagggaaattgtctggagtgatgccgaactgattgccgctggcggcacattaacaccactgagtaccacacaattcaacttggttttaccgccttataaacgcacagcacaagtgagtcgggtaacggacgacctgacagccaacttttattcgcttagtgcgctcgcggttgatcaccaaggaaaccgatctaactcattcacattgagcgtcaccgttcagcagcctcagttgacattaacggcggccgtcattggtgatggcgcaccggctaatgggaaaactgcaatcaccgttgagttcaccgttgctgattttgaggggaaacccttagccgggcaggaggtggtgataaccaccaataatggtgcgctaccgaataaaatcacggaaaagacagatgcaaatggcgtcgcgcgcattgcattaaccaatacgacagatggcgtgacggtagtcacagcagaagtggaggggcaacggcaaagtgttgatacccactttgttaagggtactatcgcggcggataaatccactctggctgcggtaccgacatctatcatcgctgatggtctaatggcttcaaccatcacgttggagttgaaggatacctatggggacccgcaggctggcgcgaatgtggcttttgacacaaccttaggcaatatgggcgttatcacggatcacaatgacggcacttatagcgcaccattgaccagtaccacgttgggggtagcaacagtaacggtgaaagtggatggggctgcgttcagtgtgccgagtgtgacggttaatttcacggcagatcctattccagatgctggccgctccagtttcaccgtctccacaccggatatcttggctgatggcacgatgagttccacattatcctttgtccctgtcgataagaatggccattttatcagtgggatgcagggcttgagttttactcaaaacggtgtgccggtgagtattagccccattaccgagcagccagatagctataccgcgacggtggttgggaatagtgtcggtgatgtcacaatcacgccgcaggttgataccctgatactgagtacattgcagaaaaaaatatccctattcccggtacctacgctgaccggtattctggttaacgggcaaaatttcgctacggataaagggttcccgaaaacgatctttaaaaacgccacattccagttacagatggataacgatgttgctaataatactcagtatgagtggtcgtcgtcattcacacccaatgtatcggttaacgatcagggtcaggtgacgattacctaccaaacctatagcgaagtggctgtgacggcgaaaagtaaaaaattcccaagttattcggtgagttatcggttctacccaaatcggtggatatacgatggcggcagatcgctggtatccagtctcgaggccagcagacaatgccaaggttcagatatgtctgcggttcttgaatcctcacgtgcaaccaacggaacgcgtgcgcctgacgggacattgtggggcgagtgggggagcttgaccgcgtatagttctgattggcaatctggtgaatattgggtcaaaaagaccagcacggattttgaaaccatgaatatggacacaggcgcactgcaaccagggcctgcatacttggcgttcccgctctgtgcgctgtcaatataaccagataacagatagcaataagaacagtttaatgagctgattatttggggcgcgaatgggagtccggcaatcctagactcgccccataagtagcaaacgtccagagaacaacgccgctcaggttaattgagcggcgttgtttttttaaaaggatttgtcgcgataagcgtgagctggcgttaaatgccgatcttacggcccagctgcaggtcgacggatcccccccctcctttgattagtatattcctatcttaaagtgacttttatgttgaggcattaacatttgttaacgacgataaagggacagcaggactagaataaagctataaagcaagcatataatattgcgtttcatctttagaagcgaatttcgccaatattataattatcaaaagagaggggtggcaaacggtatttggcattattaggttaaaaaatgtagaaggagagtgaaacccatgaaaaaaataatgctagtttttattacacttatattagttagtctaccaattgcgcaacaaactgaagcaaaggatgcatctgcattcaataaagaaaattcaatttcatccatggcaccaccagcatctccgcctgcaagtcctaagacgccaatcgaaaagaaacacgcggatgaaatcgataagtatatacaaggattggattacaataaaaacaatgtattagtataccacggagatgcagtgacaaatgtgccgccaagaaaaggttacaaagatggaaatgaatatattgttgtggagaaaaagaagaaatccatcaatcaaaataatgcagacattcaagttgtgaatgcaatttcgagcctaacctatccaggtgctctcgtaaaagcgaattcggaattagtagaaaatcaaccagatgttctccctgtaaaacgtgattcattaacactcagcattgatttgccaggtatgactaatcaagacaataaaatcgttgtaaaaaatgccactaaatcaaacgttaacaacgcagtaaatacattagtggaaagatggaatgaaaaatatgctcaagcttatccaaatgtaagtgcaaaaattgattatgatgacgaaatggcttacagtgaatcacaattaattgcgaaatttggtacagcatttaaagctgtaaataatagcttgaatgtaaacttcggcgcaatcagtgaagggaaaatgcaagaagaagtcattagttttaaacaaatttactataacgtgaatgttaatgaacctacaagaccttccagatttttcggcaaagctgttactaaagagcagttgcaagcgcttggagtgaatgcagaaaatcctcctgcatatatctcaagtgtggcgtatggccgtcaagtttatttgaaattatcaactaattcccatagtactaaagtaaaagctgcttttgatgctgccgtaagcggaaaatctgtctcaggtgatgtagaactaacaaatatcatcaaaaattcttccttcaaagccgtaatttacggaggttccgcaaaagatgaagttcaaatcatcgacggcaacctcggagacttacgcgatattttgaaaaaaggcgctacttttaatcgagaaacaccaggagttcccattgcttatacaacaaacttcctaaaagacaatgaattagctgttattaaaaacaactcagaatatattgaaacaacttcaaaagcttatacagatggaaaaattaacatcgatcactctggaggatacgttgctcaattcaacatttcttgggatgaagtaaattatgatcctgaaggtaacgaaattgttcaacataaaaactggagcgaaaacaataaaagcaagctagctcatttcacatcgtccatctatttgccaggtaacgcgagaaatattaatgtttacgctaaagaatgcactggtttagcttgggaatggtggagaacggtaattgatgaccggaacttaccacttgtgaaaaatagaaatatctccatctggggcaccacgctttatccgaaatatagtaataaagtagataatccaatcgaataattgtaaaagtaataaaaaattaagaataaaaccgcttaacacacacgaaaaaataagcttgttttgcactcttcgtaaattattttgtgaagaatgtagaaacaggcttattttttaatttttttagaagaattaacaaatgtaaaagaatatctgactgtttatccatataatataagcatatcccaaagtttaagccacctatagtttctactgcaaaacgtataatttagttcccacatatactaaaaaacgtgtccttaactctctctgtcagattagttgtaggtggcttaaacttagttttacgaattaaaaaggagcggtgaaatgaaaagtaaacttatttgtatcatcatggtaatagcttttcaggctcatttcactatgacggtaaaagcagattctgtcggggaagaaaaacttcaaaataatacacaagccaaaaagacccctgctgatttaaaagctttgccagattcctgcgaagcaaaagatttttataaaaattttaaaattcttgatatgacaaaagataagctaggcgttacgcattatacgctcgcgctaagttctggtggttacttgaccgataatgatgaaatcaagggggaattcnnn

SEQ ID NO: 250 - DNA, 846 bp, Aeromonas hydrophila
  CDS (1)..(846): aadA
atgataaacacagtgcccgccgagatttcggtacagttatcacaggcactcaacgtcatcgagcatcatctgggatcgacgttgctggccatgcatttgtatggctctgcactcgacggtggcctgaagccatacagtgatattgatttgctggttactgtgaccgcacggctcgatgagagtgtgcggcaagctctgttcgtcgatctcttgggggtttccgttttccctggtcaaagcagagttctccgcgccttggaagttaccattgtcgtgcacagtgacatcgttccttggcgctatccggacagacgggaactgcaattcggggagtggcagcgcaaagacattcttgcgggcatcttcgagcctgcgacaaccgatgttgatctagccattctgctaacaaaagcaaggcaacatagccttgccttggccggttcggctggggaagatttcttcaacccagtcccggaaagcgatctattcaaggcactggccgacaccctgaaactatggaactcacagccggattggataggtgacgagcggaatgtagtgcttactttgtctcgtatttggtacagcgcagcaaccggcaagatcgcgccgaaggatgttgccgccaactgggtaatggagcgtttgccagttcaacatcagcccgtgctgcttgaagcccggcaggcttatcttggacaaggagaagattgcttggcttcgctcacggatcagttagaggcgtttgttcacttcgtgaagcatgaagccactaaactgcttggtgccacgccaatgatgtctaacaattcattcaagccgacgccgcttcgcggcgcggcttaa

SEQ ID NO: 251 - protein, 281 aa, Aeromonas hydrophila
MINTVPAEISVQLSQALNVIEHHLGSTLLAMHLYGSALDGGLKPYSDIDLLVTVTARLDESVRQALFVDLLGVSVFPGQSRVLRALEVTIVVHSDIVPWRYPDRRELQFGEWQRKDILAGIFEPATTDVDLAILLTKARQHSLALAGSAGEDFFNPVPESDLFKALADTLKLWNSQPDWIGDERNVVLTLSRIWYSAATGKIAPKDVAANWVMERLPVQHQPVLLEARQAYLGQGEDCLASLTDQLEAFVHFVKHEATKLLGATPMMSNNSFKPTPLRGAA

SEQ ID NO: 252 - DNA, 3006 bp, Yersinia pseudotuberculosis
  CDS (46)..(3006): Invasin BZ22_RS15195
catgcagtttgacgtatgacaggtatgctttatttcatttaaattatgatggttttccagccaatcagtgagtttctcttgataaggaatgcgggaatgtctatgtattttaataaaataatttcatttaatattatttcacgaatagttatttgtatctttttgatatgtggaatgttcatggctggggcttcagaaaaatatgatgctaacgcaccgcaacaggtccagccttattctgtctcttcatctgcatttgaaaatctccatcctaataatgaaatggagagttcaatcaatcccttttccgcatcggatacagaaagaaatgctgcaataatagatcgcgccaataaggagcaggagactgaagcggtgaataagatgataagcaccggggccaggttagctgcatcaggcagggcatctgatgttgctcactcaatggtgggcgatgcggttaatcaagaaatcaaacagtggttaaatcgattcggtacggctcaagttaatctgaattttgacaaaaatttttcgctaaaagaaagctctcttgattggctggctccttggtatgactctgcttcattcctcttttttagtcagttaggtattcgcaataaagacagccgcaacacacttaaccttggcgtcgggatacgtacattggagaacggttggctgtacggacttaatactttttatgataatgatttgaccggccacaaccaccgtatcggtcttggtgccgaggcctggaccgattatttacagttggctgccaatgggtattttcgcctcaatggatggcactcgtcgcgtgatttctccgactataaagagcgcccagccactgggggggatttgcgcgcgaatgcttatttacctgcactcccacaactgggggggaagttgatgtatgagcaatacaccggtgagcgtgttgctttatttggtaaagataatctgcaacgcaacccttatgccgtgactgccgggatcaattacacccccgtgcctctactcactgtcggggtagatcagcgtatggggaaaagcagtaagcatgaaacacagtggaacctccaaatgaactatcgcctgggcgagagttttcagtcgcaacttagcccttcagcggtggcaggaacacgtctactggcggagagccgctataaccttgtcgatcgtaacaataatatcgtgttggagtatcagaaacagcaggtggttaaactgacattatcgccagcaactatctccggcctgccgggtcaggtttatcaggtgaacgcacaagtacaaggggcatctgctgtaagggaaattgtctggagtgatgccgaactgattgccgctggcggcacattaacaccactgagtaccacacaattcaacttggttttaccgccttataaacgcacagcacaagtgagtcgggtaacggacgacctgacagccaacttttattcgcttagtgcgctcgcggttgatcaccaaggaaaccgatctaactcattcacattgagcgtcaccgttcagcagcctcagttgacattaacggcggccgtcattggtgatggcgcaccggctaatgggaaaactgcaatcaccgttgagttcaccgttgctgattttgaggggaaacccttagccgggcaggaggtggtgataaccaccaataatggtgcgctaccgaataaaatcacggaaaagacagatgcaaatggcgtcgcgcgcattgcattaaccaatacgacagatggcgtgacggtagtcacagcagaagtggaggggcaacggcaaagtgttgatacccactttgttaagggtactatcgcggcggataaatccactctggctgcggtaccgacatctatcatcgctgatggtctaatggcttcaaccatcacgttggagttgaaggatacctatggggacccgcaggctggcgcgaatgtggcttttgacacaaccttaggcaatatgggcgttatcacggatcacaatgacggcacttatagcgcaccattgaccagtaccacgttgggggtagcaacagtaacggtgaaagtggatggggctgcgttcagtgtgccgagtgtgacggttaatttcacggcagatcctattccagatgctggccgctccagtttcaccgtctccacaccggatatcttggctgatggcacgatgagttccacattatcctttgtccctgtcgataagaatggccattttatcagtgggatgcagggcttgagttttactcaaaacggtgtgccggtgagtattagccccattaccgagcagccagatagctataccgcgacggtggttgggaatagtgtcggtgatgtcacaatcacgccgcaggttgataccctgatactgagtacattgcagaaaaaaatatccctattcccggtacctacgctgaccggtattctggttaacgggcaaaatttcgctacggataaagggttcccgaaaacgatctttaaaaacgccacattccagttacagatggataacgatgttgctaataatactcagtatgagtggtcgtcgtcattcacacccaatgtatcggttaacgatcagggtcaggtgacgattacctaccaaacctatagcgaagtggctgtgacggcgaaaagtaaaaaattcccaagttattcggtgagttatcggttctacccaaatcggtggatatacgatggcggcagatcgctggtatccagtctcgaggccagcagacaatgccaaggttcagatatgtctgcggttcttgaatcctcacgtgcaaccaacggaacgcgtgcgcctgacgggacattgtggggcgagtgggggagcttgaccgcgtatagttctgattggcaatctggtgaatattgggtcaaaaagaccagcacggattttgaaaccatgaatatggacacaggcgcactgcaaccagggcctgcatacttggcgttcccgctctgtgcgctgtcaatataa

SEQ ID NO: 253 - protein, 986 aa, Yersinia pseudotuberculosis; identical to SEQ ID NO: 2

SEQ ID NO: 254 - DNA, 1590 bp, Listeria monocytogenes; identical to SEQ ID NO: 5
  CDS (1)..(1590): listeriolysin precursor (hlyA)

SEQ ID NO: 255 - protein, 529 aa, Listeria monocytogenes; identical to SEQ ID NO: 6

SEQ ID NO: 256 - DNA, 121 bp, Listeria monocytogenes
  misc_feature (1)..(121): lmos06
atatcccaaagtttaagccacctatagtttctactgcaaaacgtataatttagttcccacatatactaaaaaacgtgtccttaactctctctgtcagattagttgtaggtggcttaaactt

SEQ ID NO: 257 - DNA, 279 bp, Listeria monocytogenes
  CDS (1)..(279): mpl
atgaaaagtaaacttatttgtatcatcatggtaatagcttttcaggctcatttcactatgacggtaaaagcagattctgtcggggaagaaaaacttcaaaataatacacaagccaaaaagacccctgctgatttaaaagctttgccagattcctgcgaagcaaaagatttttataaaaattttaaaattcttgatatgacaaaagataagctaggcgttacgcattatacgctcgcgctaagttctggtggttacttgaccgataatgatgaaatcaag

SEQ ID NO: 258 - protein, 93 aa, Listeria monocytogenes
MKSKLICIIMVIAFQAHFTMTVKADSVGEEKLQNNTQAKKTPADLKALPDSCEAKDFYKNFKILDMTKDKLGVTHYTLALSSGGYLTDNDEIK

SEQ ID NO: 259 - DNA, 8439 bp, Artificial sequence
  synthetic
  misc_feature (1)..(8439): plasmid pGB3
  misc_feature (6079)..(6095): n means any nucleic acid (A, T, C or G)
attaatgcggatattgcggagtaacacttcagactgaaagtagaaataaaaaccgcagcagacaactgacaacatcaaatgaagggggcttattctaattgatattatttatatgataatagttcattttgtattttgtttttttgatattctcacctgcttagttacaataaatcaattctatcgctgtatggtatagactgttttattatatattttgaatatttttaatctgcccagtctggttttttaaaaaagtgctatcctcttaatgtctttactaaattagaaaacaagtttcactttcaactattgcatctttaattaatggtcaaggtgatttcaaatgctcgtttgtggccagttatacctcaaataactcaagttgttgagcacagccaacgcacatgcagtttgacgtatgacaggtatgctttatttcatttaaattatgatggttttccagccaatcagtgagtttctcttgataaggaatgcgggaatgtctatgtattttaataaaataatttcatttaatattatttcacgaatagttatttgtatctttttgatatgtggaatgttcatggctggggcttcagaaaaatatgatgctaacgcaccgcaacaggtccagccttattctgtctcttcatctgcatttgaaaatctccatcctaataatgaaatggagagttcaatcaatcccttttccgcatcggatacagaaagaaatgctgcaataatagatcgcgccaataaggagcaggagactgaagcggtgaataagatgataagcaccggggccaggttagctgcatcaggcagggcatctgatgttgctcactcaatggtgggcgatgcggttaatcaagaaatcaaacagtggttaaatcgattcggtacggctcaagttaatctgaattttgacaaaaatttttcgctaaaagaaagctctcttgattggctggctccttggtatgactctgcttcattcctcttttttagtcagttaggtattcgcaataaagacagccgcaacacacttaaccttggcgtcgggatacgtacattggagaacggttggctgtacggacttaatactttttatgataatgatttgaccggccacaaccaccgtatcggtcttggtgccgaggcctggaccgattatttacagttggctgccaatgggtattttcgcctcaatggatggcactcgtcgcgtgatttctccgactataaagagcgcccagccactgggggggatttgcgcgcgaatgcttatttacctgcactcccacaactgggggggaagttgatgtatgagcaatacaccggtgagcgtgttgctttatttggtaaagataatctgcaacgcaacccttatgccgtgactgccgggatcaattacacccccgtgcctctactcactgtcggggtagatcagcgtatggggaaaagcagtaagcatgaaacacagtggaacctccaaatgaactatcgcctgggcgagagttttcagtcgcaacttagcccttcagcggtggcaggaacacgtctactggcggagagccgctataaccttgtcgatcgtaacaataatatcgtgttggagtatcagaaacagcaggtggttaaactgacattatcgccagcaactatctccggcctgccgggtcaggtttatcaggtgaacgcacaagtacaaggggcatctgctgtaagggaaattgtctggagtgatgccgaactgattgccgctggcggcacattaacaccactgagtaccacacaattcaacttggttttaccgccttataaacgcacagcacaagtgagtcgggtaacggacgacctgacagccaacttttattcgcttagtgcgctcgcggttgatcaccaaggaaaccgatctaactcattcacattgagcgtcaccgttcagcagcctcagttgacattaacggcggccgtcattggtgatggcgcaccggctaatgggaaaactgcaatcaccgttgagttcaccgttgctgattttgaggggaaacccttagccgggcaggaggtggtgataaccaccaataatggtgcgctaccgaataaaatcacggaaaagacagatgcaaatggcgtcgcgcgcattgcattaaccaatacgacagatggcgtgacggtagtcacagcagaagtggaggggcaacggcaaagtgttgatacccactttgttaagggtactatcgcggcggataaatccactctggctgcggtaccgacatctatcatcgctgatggtctaatggcttcaaccatcacgttggagttgaaggatacctatggggacccgcaggctggcgcgaatgtggcttttgacacaaccttaggcaatatgggcgttatcacggatcacaatgacggcacttatagcgcaccattgaccagtaccacgttgggggtagcaacagtaacggtgaaagtggatggggctgcgttcagtgtgccgagtgtgacggttaatttcacggcagatcctattccagatgctggccgctccagtttcaccgtctccacaccggatatcttggctgatggcacgatgagttccacattatcctttgtccctgtcgataagaatggccattttatcagtgggatgcagggcttgagttttactcaaaacggtgtgccggtgagtattagccccattaccgagcagccagatagctataccgcgacggtggttgggaatagtgtcggtgatgtcacaatcacgccgcaggttgataccctgatactgagtacattgcagaaaaaaatatccctattcccggtacctacgctgaccggtattctggttaacgggcaaaatttcgctacggataaagggttcccgaaaacgatctttaaaaacgccacattccagttacagatggataacgatgttgctaataatactcagtatgagtggtcgtcgtcattcacacccaatgtatcggttaacgatcagggtcaggtgacgattacctaccaaacctatagcgaagtggctgtgacggcgaaaagtaaaaaattcccaagttattcggtgagttatcggttctacccaaatcggtggatatacgatggcggcagatcgctggtatccagtctcgaggccagcagacaatgccaaggttcagatatgtctgcggttcttgaatcctcacgtgcaaccaacggaacgcgtgcgcctgacgggacattgtggggcgagtgggggagcttgaccgcgtatagttctgattggcaatctggtgaatattgggtcaaaaagaccagcacggattttgaaaccatgaatatggacacaggcgcactgcaaccagggcctgcatacttggcgttcccgctctgtgcgctgtcaatataaccagataacagatagcaataagaacagtttaatgagctgattatttggggcgcgaatgggagtccggcaatcctagactcgccccataagtagcaaacgtccagagaacaacgccgctcaggttaattgagcggcgttgtttttttaaaaggatttgtcgcgataagcgtgagctggcgttaaatgccgatcttacggcccagctgcaggtcgacggatcccccccctcctttgattagtatattcctatcttaaagtgacttttatgttgaggcattaacatttgttaacgacgataaagggacagcaggactagaataaagctataaagcaagcatataatattgcgtttcatctttagaagcgaatttcgccaatattataattatcaaaagagaggggtggcaaacggtatttggcattattaggttaaaaaatgtagaaggagagtgaaacccatgaaaaaaataatgctagtttttattacacttatattagttagtctaccaattgcgcaacaaactgaagcaaaggatgcatctgcattcaataaagaaaattcaatttcatccatggcaccaccagcatctccgcctgcaagtcctaagacgccaatcgaaaagaaacacgcggatgaaatcgataagtatatacaaggattggattacaataaaaacaatgtattagtataccacggagatgcagtgacaaatgtgccgccaagaaaaggttacaaagatggaaatgaatatattgttgtggagaaaaagaagaaatccatcaatcaaaataatgcagacattcaagttgtgaatgcaatttcgagcctaacctatccaggtgctctcgtaaaagcgaattcggaattagtagaaaatcaaccagatgttctccctgtaaaacgtgattcattaacactcagcattgatttgccaggtatgactaatcaagacaataaaatcgttgtaaaaaatgccactaaatcaaacgttaacaacgcagtaaatacattagtggaaagatggaatgaaaaatatgctcaagcttatccaaatgtaagtgcaaaaattgattatgatgacgaaatggcttacagtgaatcacaattaattgcgaaatttggtacagcatttaaagctgtaaataatagcttgaatgtaaacttcggcgcaatcagtgaagggaaaatgcaagaagaagtcattagttttaaacaaatttactataacgtgaatgttaatgaacctacaagaccttccagatttttcggcaaagctgttactaaagagcagttgcaagcgcttggagtgaatgcagaaaatcctcctgcatatatctcaagtgtggcgtatggccgtcaagtttatttgaaattatcaactaattcccatagtactaaagtaaaagctgcttttgatgctgccgtaagcggaaaatctgtctcaggtgatgtagaactaacaaatatcatcaaaaattcttccttcaaagccgtaatttacggaggttccgcaaaagatgaagttcaaatcatcgacggcaacctcggagacttacgcgatattttgaaaaaaggcgctacttttaatcgagaaacaccaggagttcccattgcttatacaacaaacttcctaaaagacaatgaattagctgttattaaaaacaactcagaatatattgaaacaacttcaaaagcttatacagatggaaaaattaacatcgatcactctggaggatacgttgctcaattcaacatttcttgggatgaagtaaattatgatcctgaaggtaacgaaattgttcaacataaaaactggagcgaaaacaataaaagcaagctagctcatttcacatcgtccatctatttgccaggtaacgcgagaaatattaatgtttacgctaaagaatgcactggtttagcttgggaatggtggagaacggtaattgatgaccggaacttaccacttgtgaaaaatagaaatatctccatctggggcaccacgctttatccgaaatatagtaataaagtagataatccaatcgaataattgtaaaagtaataaaaaattaagaataaaaccgcttaacacacacgaaaaaataagcttgttttgcactcttcgtaaattattttgtgaagaatgtagaaacaggcttattttttaatttttttagaagaattaacaaatgtaaaagaatatctgactgtttatccatataatataagcatatcccaaagtttaagccacctatagtttctactgcaaaacgtataatttagttcccacatatactaaaaaacgtgtccttaactctctctgtcagattagttgtaggtggcttaaacttagttttacgaattaaaaaggagcggtgaaatgaaaagtaaacttatttgtatcatcatggtaatagcttttcaggctcatttcactatgacggtaaaagcagattctgtcggggaagaaaaacttcaaaataatacacaagccaaaaagacccctgctgatttaaaagctttgccagattcctgcgaagcaaaagatttttataaaaattttaaaattcttgatatgacaaaagataagctaggcgttacgcattatacgctcgcgctaagttctggtggttacttgaccgataatgatgaaatcaagggggaattcnnnnnnnnnnnnnnnnngagttatacacagggctgggatctattctttttatctttttttattctttctttattctataaattataaccacttgaatataaacaaaaaaaacacacaaaggtctagcggaatttacagagggtctagcagaatttacaagttttccagcaaaggtctagcagaatttacagatacccacaactcaaaggaaaaggactagtaattatcattgactagcccatctcaattggtatagtgattaaaatcacctagaccaattgagatgtatgtctgaattagttgttttcaaagcaaatgaactagcgattagtcgctatgacttaacggagcatgaaaccaagctaattttatgctgtgtggcactactcaaccccacgattgaaaaccctacaaggaaagaacggacggtatcgttcacttataaccaatacgctcagatgatgaacatcagtagggaaaatgcttatggtgtattagctaaagcaaccagagagctgatgacgagaactgtggaaatcaggaatcctatggttaaaggctctgagattttccagtggacaaactatgccaagttctcaagcgaaaaattagaattagtttttagtgaagagatattgccttatcttttccagttaaaaaaattcataaaatataatctggaacatgttaagtcttttgaaaacaaatactctatgaggatttatgagtggttattaaaagaactaacacaaaagaaaactcacaaggcaaatatagagattagccttgatgaatttaagttcatgttaatgcttgaaaataactaccatgagtttaaaaggcttaaccaatgggttttgaaaccaataagtaaagatttaaacacttacagcaatatgaaattggtggttgataagcgaggccgcccgactgatacgttgattttccaagttgaactagatagacaaatggatctcgtaaccgaacttgagaacaaccagataaaaatgaatggtgacaaaataccaacaaccattacatcagattcctacctacataacggactaagaaaaacactacacgatgctttaactgcaaaaattcagctcaccagttttgaggcaaaatttttgagtgacatgcaaagtaagtatgatctcaatggttcgttctcatggctcacgcaaaaacaacgaaccacactagagaacatactggctaaatacggaaggatccgttttctcaccaataaaaaacgcccggcggcaaccgagcgttctgaacaaatccagatggagttctgaggtcattactggatctatcaacaggagtccaagcgagctctaaacttggtctgacagttaccaatgcttaatcagtgaggcacctatctcagcgatctgtctatttcgttcatccatagttgcctgactccccgtcgtgtagataactacgatacgggagggcttaccatctggccccagtgctgcaatgataccgcgagacccacgctcaccggctccagatttatcagcaataaaccagccagccggaagggccgagcgcagaagtggtcctgcaactttatccgcctccatccagtctattaattgttgccgggaagctagagtaagtagttcgccagttaatagtttgcgcaacgttgttgccattgctgcaggcatcgtggtgtcacgctcgtcgtttggtatggcttcattcagctccggttcccaacgatcaaggcgagttacatgatcccccatgttgtgcaaaaaagcggttagctccttcggtcctccgatcgttgtcagaagtaagttggccgcagtgttatcactcatggttatggcagcactgcataattctcttactgtcatgccatccgtaagatgcttttctgtgactggtgagtactcaaccaagtcattctgagaatagtgtatgcggcgaccgagttgctcttgcccggcgtcaacacgggataataccgcgccacatagcagaactttaaaagtgctcatcattggaaaacgttcttcggggcgaaaactctcaaggatcttaccgctgttgagatccagttcgatgtaacccactcgtgcacccaactgatcttcagcatcttttactttcaccagcgtttctgggtgagcaaaaacaggaaggcaaaatgccgcaaaaaagggaataagggcgacacggaaatgttgaatactcatactcttcctttttcaatattattgaagcatttatcagggttattgtctcatgagcggatacatatttgacgtctaagaaaccattattatcatgacattaacctataaaaataggcgtatcacgaggccctttcgtctt

SEQ ID NO: 260 - DNA, 9156 bp, Artificial sequence
  synthetic
  misc_feature (1)..(9156): plasmid pGB4
  misc_feature (6079)..(6095): n means any nucleic acid (A, T, C or G)
attaatgcggatattgcggagtaacacttcagactgaaagtagaaataaaaaccgcagcagacaactgacaacatcaaatgaagggggcttattctaattgatattatttatatgataatagttcattttgtattttgtttttttgatattctcacctgcttagttacaataaatcaattctatcgctgtatggtatagactgttttattatatattttgaatatttttaatctgcccagtctggttttttaaaaaagtgctatcctcttaatgtctttactaaattagaaaacaagtttcactttcaactattgcatctttaattaatggtcaaggtgatttcaaatgctcgtttgtggccagttatacctcaaataactcaagttgttgagcacagccaacgcacatgcagtttgacgtatgacaggtatgctttatttcatttaaattatgatggttttccagccaatcagtgagtttctcttgataaggaatgcgggaatgtctatgtattttaataaaataatttcatttaatattatttcacgaatagttatttgtatctttttgatatgtggaatgttcatggctggggcttcagaaaaatatgatgctaacgcaccgcaacaggtccagccttattctgtctcttcatctgcatttgaaaatctccatcctaataatgaaatggagagttcaatcaatcccttttccgcatcggatacagaaagaaatgctgcaataatagatcgcgccaataaggagcaggagactgaagcggtgaataagatgataagcaccggggccaggttagctgcatcaggcagggcatctgatgttgctcactcaatggtgggcgatgcggttaatcaagaaatcaaacagtggttaaatcgattcggtacggctcaagttaatctgaattttgacaaaaatttttcgctaaaagaaagctctcttgattggctggctccttggtatgactctgcttcattcctcttttttagtcagttaggtattcgcaataaagacagccgcaacacacttaaccttggcgtcgggatacgtacattggagaacggttggctgtacggacttaatactttttatgataatgatttgaccggccacaaccaccgtatcggtcttggtgccgaggcctggaccgattatttacagttggctgccaatgggtattttcgcctcaatggatggcactcgtcgcgtgatttctccgactataaagagcgcccagccactgggggggatttgcgcgcgaatgcttatttacctgcactcccacaactgggggggaagttgatgtatgagcaatacaccggtgagcgtgttgctttatttggtaaagataatctgcaacgcaacccttatgccgtgactgccgggatcaattacacccccgtgcctctactcactgtcggggtagatcagcgtatggggaaaagcagtaagcatgaaacacagtggaacctccaaatgaactatcgcctgggcgagagttttcagtcgcaacttagcccttcagcggtggcaggaacacgtctactggcggagagccgctataaccttgtcgatcgtaacaataatatcgtgttggagtatcagaaacagcaggtggttaaactgacattatcgccagcaactatctccggcctgccgggtcaggtttatcaggtgaacgcacaagtacaaggggcatctgctgtaagggaaattgtctggagtgatgccgaactgattgccgctggcggcacattaacaccactgagtaccacacaattcaacttggttttaccgccttataaacgcacagcacaagtgagtcgggtaacggacgacctgacagccaacttttattcgcttagtgcgctcgcggttgatcaccaaggaaaccgatctaactcattcacattgagcgtcaccgttcagcagcctcagttgacattaacggcggccgtcattggtgatggcgcaccggctaatgggaaaactgcaatcaccgttgagttcaccgttgctgattttgaggggaaacccttagccgggcaggaggtggtgataaccaccaataatggtgcgctaccgaataaaatcacggaaaagacagatgcaaatggcgtcgcgcgcattgcattaaccaatacgacagatggcgtgacggtagtcacagcagaagtggaggggcaacggcaaagtgttgatacccactttgttaagggtactatcgcggcggataaatccactctggctgcggtaccgacatctatcatcgctgatggtctaatggcttcaaccatcacgttggagttgaaggatacctatggggacccgcaggctggcgcgaatgtggcttttgacacaaccttaggcaatatgggcgttatcacggatcacaatgacggcacttatagcgcaccattgaccagtaccacgttgggggtagcaacagtaacggtgaaagtggatggggctgcgttcagtgtgccgagtgtgacggttaatttcacggcagatcctattccagatgctggccgctccagtttcaccgtctccacaccggatatcttggctgatggcacgatgagttccacattatcctttgtccctgtcgataagaatggccattttatcagtgggatgcagggcttgagttttactcaaaacggtgtgccggtgagtattagccccattaccgagcagccagatagctataccgcgacggtggttgggaatagtgtcggtgatgtcacaatcacgccgcaggttgataccctgatactgagtacattgcagaaaaaaatatccctattcccggtacctacgctgaccggtattctggttaacgggcaaaatttcgctacggataaagggttcccgaaaacgatctttaaaaacgccacattccagttacagatggataacgatgttgctaataatactcagtatgagtggtcgtcgtcattcacacccaatgtatcggttaacgatcagggtcaggtgacgattacctaccaaacctatagcgaagtggctgtgacggcgaaaagtaaaaaattcccaagttattcggtgagttatcggttctacccaaatcggtggatatacgatggcggcagatcgctggtatccagtctcgaggccagcagacaatgccaaggttcagatatgtctgcggttcttgaatcctcacgtgcaaccaacggaacgcgtgcgcctgacgggacattgtggggcgagtgggggagcttgaccgcgtatagttctgattggcaatctggtgaatattgggtcaaaaagaccagcacggattttgaaaccatgaatatggacacaggcgcactgcaaccagggcctgcatacttggcgttcccgctctgtgcgctgtcaatataaccagataacagatagcaataagaacagtttaatgagctgattatttggggcgcgaatgggagtccggcaatcctagactcgccccataagtagcaaacgtccagagaacaacgccgctcaggttaattgagcggcgttgtttttttaaaaggatttgtcgcgataagcgtgagctggcgttaaatgccgatcttacggcccagctgcaggtcgacggatcccccccctcctttgattagtatattcctatcttaaagtgacttttatgttgaggcattaacatttgttaacgacgataaagggacagcaggactagaataaagctataaagcaagcatataatattgcgtttcatctttagaagcgaatttcgccaatattataattatcaaaagagaggggtggcaaacggtatttggcattattaggttaaaaaatgtagaaggagagtgaaacccatgaaaaaaataatgctagtttttattacacttatattagttagtctaccaattgcgcaacaaactgaagcaaaggatgcatctgcattcaataaagaaaattcaatttcatccatggcaccaccagcatctccgcctgcaagtcctaagacgccaatcgaaaagaaacacgcggatgaaatcgataagtatatacaaggattggattacaataaaaacaatgtattagtataccacggagatgcagtgacaaatgtgccgccaagaaaaggttacaaagatggaaatgaatatattgttgtggagaaaaagaagaaatccatcaatcaaaataatgcagacattcaagttgtgaatgcaatttcgagcctaacctatccaggtgctctcgtaaaagcgaattcggaattagtagaaaatcaaccagatgttctccctgtaaaacgtgattcattaacactcagcattgatttgccaggtatgactaatcaagacaataaaatcgttgtaaaaaatgccactaaatcaaacgttaacaacgcagtaaatacattagtggaaagatggaatgaaaaatatgctcaagcttatccaaatgtaagtgcaaaaattgattatgatgacgaaatggcttacagtgaatcacaattaattgcgaaatttggtacagcatttaaagctgtaaataatagcttgaatgtaaacttcggcgcaatcagtgaagggaaaatgcaagaagaagtcattagttttaaacaaatttactataacgtgaatgttaatgaacctacaagaccttccagatttttcggcaaagctgttactaaagagcagttgcaagcgcttggagtgaatgcagaaaatcctcctgcatatatctcaagtgtggcgtatggccgtcaagtttatttgaaattatcaactaattcccatagtactaaagtaaaagctgcttttgatgctgccgtaagcggaaaatctgtctcaggtgatgtagaactaacaaatatcatcaaaaattcttccttcaaagccgtaatttacggaggttccgcaaaagatgaagttcaaatcatcgacggcaacctcggagacttacgcgatattttgaaaaaaggcgctacttttaatcgagaaacaccaggagttcccattgcttatacaacaaacttcctaaaagacaatgaattagctgttattaaaaacaactcagaatatattgaaacaacttcaaaagcttatacagatggaaaaattaacatcgatcactctggaggatacgttgctcaattcaacatttcttgggatgaagtaaattatgatcctgaaggtaacgaaattgttcaacataaaaactggagcgaaaacaataaaagcaagctagctcatttcacatcgtccatctatttgccaggtaacgcgagaaatattaatgtttacgctaaagaatgcactggtttagcttgggaatggtggagaacggtaattgatgaccggaacttaccacttgtgaaaaatagaaatatctccatctggggcaccacgctttatccgaaatatagtaataaagtagataatccaatcgaataattgtaaaagtaataaaaaattaagaataaaaccgcttaacacacacgaaaaaataagcttgttttgcactcttcgtaaattattttgtgaagaatgtagaaacaggcttattttttaatttttttagaagaattaacaaatgtaaaagaatatctgactgtttatccatataatataagcatatcccaaagtttaagccacctatagtttctactgcaaaacgtataatttagttcccacatatactaaaaaacgtgtccttaactctctctgtcagattagttgtaggtggcttaaacttagttttacgaattaaaaaggagcggtgaaatgaaaagtaaacttatttgtatcatcatggtaatagcttttcaggctcatttcactatgacggtaaaagcagattctgtcggggaagaaaaacttcaaaataatacacaagccaaaaagacccctgctgatttaaaagctttgccagattcctgcgaagcaaaagatttttataaaaattttaaaattcttgatatgacaaaagataagctaggcgttacgcattatacgctcgcgctaagttctggtggttacttgaccgataatgatgaaatcaagggggaattcnnnnnnnnnnnnnnnnngagttatacacagggctgggatctattctttttatctttttttattctttctttattctataaattataaccacttgaatataaacaaaaaaaacacacaaaggtctagcggaatttacagagggtctagcagaatttacaagttttccagcaaaggtctagcagaatttacagatacccacaactcaaaggaaaaggactagtaattatcattgactagcccatctcaattggtatagtgattaaaatcacctagaccaattgagatgtatgtctgaattagttgttttcaaagcaaatgaactagcgattagtcgctatgacttaacggagcatgaaaccaagctaattttatgctgtgtggcactactcaaccccacgattgaaaaccctacaaggaaagaacggacggtatcgttcacttataaccaatacgctcagatgatgaacatcagtagggaaaatgcttatggtgtattagctaaagcaaccagagagctgatgacgagaactgtggaaatcaggaatcctatggttaaaggctctgagattttccagtggacaaactatgccaagttctcaagcgaaaaattagaattagtttttagtgaagagatattgccttatcttttccagttaaaaaaattcataaaatataatctggaacatgttaagtcttttgaaaacaaatactctatgaggatttatgagtggttattaaaagaactaacacaaaagaaaactcacaaggcaaatatagagattagccttgatgaatttaagttcatgttaatgcttgaaaataactaccatgagtttaaaaggcttaaccaatgggttttgaaaccaataagtaaagatttaaacacttacagcaatatgaaattggtggttgataagcgaggccgcccgactgatacgttgattttccaagttgaactagatagacaaatggatctcgtaaccgaacttgagaacaaccagataaaaatgaatggtgacaaaataccaacaaccattacatcagattcctacctacataacggactaagaaaaacactacacgatgctttaactgcaaaaattcagctcaccagttttgaggcaaaatttttgagtgacatgcaaagtaagtatgatctcaatggttcgttctcatggctcacgcaaaaacaacgaaccacactagagaacatactggctaaatacggaaggatccgttttctcaccaataaaaaacgcccggcggcaaccgagcgttctgaacaaatccagatggagttctgaggtcattactggatctatcaacaggagtccaagcgagctctaaacttggtctgacagttaccaatgcttaatcagtgaggcacctatctcagcgatctgtctatttcgttcatccatagttgcctgactccccgtcgtgtagataactacgatacgggagggcttaccatctggccccagtgctgcaatgataccgcgagacccacgctcaccggctccagatttatcagcaataaaccagccagccggaagggccgagcgcagaagtggtcctgcaactttatccgcctccatccagtctattaattgttgccgggaagctagagtaagtagttcgccagttaatagtttgcgcaacgttgttgccattgctgcaggcatcgtggtgtcacgctcgtcgtttggtatggcttcattcagctccggttcccaacgatcaaggcgagttacatgatcccccatgttgtgcaaaaaagcggttagctccttcggtcctccgatcgttgtcagaagtaagttggccgcagtgttatcactcatggttatggcagcactgcataattctcttactgtcatgccatccgtaagatgcttttctgtgactggtgagtactcaaccaagtcattctgagaatagtgtatgcggcgaccgagttgctcttgcccggcgtcaacacgggataataccgcgccacatagcagaactttaaaagtgctcatcattggaaaacgttcttcggggcgaaaactctcaaggatcttaccgctgttgagatccagttcgatgtaacccactcgtgcacccaactgatcttcagcatcttttactttcaccagcgtttctgggtgagcaaaaacaggaaggcaaaatgccgcaaaaaagggaataagggcgacacggaaatgttgaatactcatctctatcatcaatcgataaaatggttcctctcgtaacatttgctcttgcctttcacttccatctcgatcgcttcgtagttcattacgatagctgacatatttccagtcttcaggtctaacatctgacgccggatactccccgggagcgattttgcttcttaatagattagactcgagacacattataaattgtcgtattttatgaagtaataaagcactatattgcgagcattcctgatctgattttacatatagcgtaaactgagctcctatccccacacgagattgctgagaaactcgattcatatcagttatcttccatttatctataggactgtcctctgaaaataataaaccagacaaaatttggaatgccagaggaacttgctccctagctatactaatatgaaacttgtccccaacaaaatcccccttactctgaggattttcacgacatgcatgaataaacacatctccactatggttcacaatctggaatccttggtacatgacagaaaaaaattgacatatatcagagtaagttggcacgttcgatgctactttgaaatagtacgctgggtattgccgtatttggttgtacaatatattgaagttatttttcaatctttcattcgcagaaagcatctgcggtatttcagacttcacaacattcaaagaatctaaatttagttttagacagggcttttttatgggcatactcttcctttttcaatattattgaagcatttatcagggttattgtctcatgagcggatacatatttgacgtctaagaaaccattattatcatgacattaacctataaaaataggcgtatcacgaggccctttcgtctt

SEQ ID NO: 261 - DNA, 717 bp, Shigella flexneri
  CDS (1)..(717): Shigella flexneri phosphothreonine lyase OspF
atgcccataaaaaagccctgtctaaaactaaatttagattctttgaatgttgtgaagtctgaaataccgcagatgctttctgcgaatgaaagattgaaaaataacttcaatatattgtacaaccaaatacggcaatacccagcgtactatttcaaagtagcatcgaacgtgccaacttactctgatatatgtcaatttttttctgtcatgtaccaaggattccagattgtgaaccatagtggagatgtgtttattcatgcatgtcgtgaaaatcctcagagtaagggggattttgttggggacaagtttcatattagtatagctagggagcaagttcctctggcattccaaattttgtctggtttattattttcagaggacagtcctatagataaatggaagataactgatatgaatcgagtttctcagcaatctcgtgtggggataggagctcagtttacgctatatgtaaaatcagatcaggaatgctcgcaatatagtgctttattacttcataaaatacgacaatttataatgtgtctcgagtctaatctattaagaagcaaaatcgctcccggggagtatccggcgtcagatgttagacctgaagactggaaatatgtcagctatcgtaatgaactacgaagcgatcgagatggaagtgaaaggcaagagcaaatgttacgagaggaaccattttatcgattgatgatagag

SEQ ID NO: 262 - protein, 239 aa, Shigella flexneri
MPIKKPCLKLNLDSLNVVKSEIPQMLSANERLKNNFNILYNQIRQYPAYYFKVASNVPTYSDICQFFSVMYQGFQIVNHSGDVFIHACRENPQSKGDFVGDKFHISIAREQVPLAFQILSGLLFSEDSPIDKWKITDMNRVSQQSRVGIGAQFTLYVKSDQECSQYSALLLHKIRQFIMCLESNLLRSKIAPGEYPASDVRPEDWKYVSYRNELRSDRDGSERQEQMLREEPFYRLMIE

SEQ ID NO: 263 - DNA, 2308 bp, Artificial sequence
  synthetic
  misc_feature (1)..(2308): plasmid pZA11
ctcgagttgacggctagctcagtcctaggtacagtgctagcgaattcattaaagaggagaaaggtaccgggccccccctcgaggtcgacggtatcgataagcttgatatcgaattcctgcagcccgggggatcccatggtacgcgtgctagaggcatcaaataaaacgaaaggctcagtcgaaagactgggcctttcgttttatctgttgtttgtcggtgaacgctctcctgagtaggacaaatccgccgccctagacgcgctagcggagtgtatactggcttactatgttggcactgatgagggtgtcagtgaagtgcttcatgtggcaggagaaaaaaggctgcaccggtgcgtcagcagaatatgtgatacaggatatattccgcttcctcgctcactgactcgctacgctcggtcgttcgactgcggcgagcggaaatggcttacgaacggggcggagatttcctggaagatgccaggaagatacttaacagggaagtgagagggccgcggcaaagccgtttttccataggctccgcccccctgacaagcatcacgaaatctgacgctcaaatcagtggtggcgaaacccgacaggactataaagataccaggcgtttccccctggcggctccctcgtgcgctctcctgttcctgcctttcggtttaccggtgtcattccgctgttatggccgcgtttgtctcattccacgcctgacactcagttccgggtaggcagttcgctccaagctggactgtatgcacgaaccccccgttcagtccgaccgctgcgccttatccggtaactatcgtcttgagtccaacccggaaagacatgcaaaagcaccactggcagcagccactggtaattgatttagaggagttagtcttgaagtcatgcgccggttaaggctaaactgaaaggacaagttttggtgactgcgctcctccaagccagttacctcggttcaaagagttggtagctcagagaaccttcgaaaaaccgccctgcaaggcggttttttcgttttcagagcaagagattacgcgcagaccaaaacgatctcaagaagatcatcttattaatcagataaaatatttctagatttcagtgcaatttatctcttcaaatgtagcacctgaagtcagccccatacgatataagttgtctagtgcttggattctcaccaataaaaaacgcccggcggcaaccgagcgttctgaacaaatccagatggagttctgaggtcattactggatctatcaacaggagtccaagcgagctctaaacttggtctgacagttaccaatgcttaatcagtgaggcacctatctcagcgatctgtctatttcgttcatccatagttgcctgactccccgtcgtgtagataactacgatacgggagggcttaccatctggccccagtgctgcaatgataccgcgagacccacgctcaccggctccagatttatcagcaataaaccagccagccggaagggccgagcgcagaagtggtcctgcaactttatccgcctccatccagtctattaattgttgccgggaagctagagtaagtagttcgccagttaatagtttgcgcaacgttgttgccattgctgcaggcatcgtggtgtcacgctcgtcgtttggtatggcttcattcagctccggttcccaacgatcaaggcgagttacatgatcccccatgttgtgcaaaaaagcggttagctccttcggtcctccgatcgttgtcagaagtaagttggccgcagtgttatcactcatggttatggcagcactgcataattctcttactgtcatgccatccgtaagatgcttttctgtgactggtgagtactcaaccaagtcattctgagaatagtgtatgcggcgaccgagttgctcttgcccggcgtcaacacgggataataccgcgccacatagcagaactttaaaagtgctcatcattggaaaacgttcttcggggcgaaaactctcaaggatcttaccgctgttgagatccagttcgatgtaacccactcgtgcacccaactgatcttcagcatcttttactttcaccagcgtttctgggtgagcaaaaacaggaaggcaaaatgccgcaaaaaagggaataagggcgacacggaaatgttgaatactcatactcttcctttttcaatattattgaagcatttatcagggttattgtctcatgagcggatacatatttgacgtctaagaaaccattattatcatgacattaacctataaaaataggcgtatcacgaggccctttcgtcttcac

SEQ ID NO: 264 - DNA, 2907 bp, Artificial sequence
  synthetic
  misc_feature (1)..(2907): plasmid pSEVA27
aaaggcatcaaataaaacgaaaggctcagtcgaaagactgggcctttcgttttatctgttgtttgtcggtgaacgctctcctgagtaggacaaatccgccgccctagacagctgggcgcgccgcgcctgtagtgccatttacccccattcactgccagagccgtgagcgcagcgaactgaatgtcacgaaaaagacagcgactcaggtgcctgatggtcggagacaaaaggaatattcagcgatttgcccgagcttgcgagggtgctacttaagcctttagggttttaaggtctgttttgtagaggagcaaacagcgtttgcgacatccttttgtaatactgcggaactgactaaagtagtgagttatacacagggctgggatctattctttttatctttttttattctttctttattctataaattataaccacttgaatataaacaaaaaaaacacacaaaggtctagcggaatttacagagggtctagcagaatttacaagttttccagcaaaggtctagcagaatttacagatacccacaactcaaaggaaaaggacatgtaattatcattgactagcccatctcaattggtatagtgattaaaatcacctagaccaattgagatgtatgtctgaattagttgttttcaaagcaaatgaactagcgattagtcgctatgacttaacggagcatgaaaccaagctaattttatgctgtgtggcactactcaaccccacgattgaaaaccctacaaggaaagaacggacggtatcgttcacttataaccaatacgctcagatgatgaacatcagtagggaaaatgcttatggtgtattagctaaagcaaccagagagctgatgacgagaactgtggaaatcaggaatcctttggttaaaggctttgagattttccagtggacaaactatgccaagttctcaagcgaaaaattagaattagtttttagtgaagagatattgccttatcttttccagttaaaaaaattcataaaatataatctggaacatgttaagtcttttgaaaacaaatactctatgaggatttatgagtggttattaaaagaactaacacaaaagaaaactcacaaggcaaatatagagattagccttgatgaatttaagttcatgttaatgcttgaaaataactaccatgagtttaaaaggcttaaccaatgggttttgaaaccaataagtaaagatttaaacacttacagcaatatgaaattggtggttgataagcgaggccgcccgactgatacgttgattttccaagttgaactagatagacaaatggatctcgtaaccgaacttgagaacaaccagataaaaatgaatggtgacaaaataccaacaaccattacatcagattcctacctacataacggactaagaaaaacactacacgatgctttaactgcaaaaattcagctcaccagttttgaggcaaaatttttgagtgacatgcaaagtaagtatgatctcaatggttcgttctcatggctcacgcaaaaacaacgaaccacactagagaacatactggctaaatacggaaggatctgaggccggcctacggccagcctcgcagagcaggattcccgttgagcaccgccaggtgcgaataagggacagtgaagaaggaacacccgctcgcgggtgggcctacttcacctatcctgcccggctgacgccgttggatacaccaaggaaagtctacacgaaccctttggcaaaatcctgtatatcgtgcgaaaaaggatggatataccgaaaaaatcgctataatgaccccgaagcagggttatgcagcggaaaaggacaacggtccaattaattattagaaaaattcatccagcatcagatgaaattgcagtttgttcatatccggattatcaatgccatatttctgaaacagacgtttttgcaggctcgggctaaattcgcccaggcagttccacagaatggccagatcctgataacgatccgcaatgcccacacggcccacatcaatgcagccaatcagtttgccttcatcgaaaatcaggttatccaggctaaaatcgccgtgggtcaccacgctatccgggctaaacggcagcagtttatgcatttctttccacacctgttccaccggccagccgttacgttcatcatcaaaatcgctcgcatccaccaggccgttgttcatacggctctgcgcctgggccagacgaaacacacgatcgctgttaaacgggcagttgcacaccggaatgctatgcagacgacgcagaaacacggccagcgcatccacaatgttttcgccgctatccggatattcttccagcacctgaaacgcggttttgcccggaatcgcggtggtcagcagccacgcatcatccggggtgcgaataaaatgtttaatggtcggcagcggcataaattcggtcagccagttcagacgcaccatttcatcggtcacatcgttcgccacgctgcctttgccatgtttcagaaacagttccggcgcatccggtttgccatacagacgataaatggtcgcgccgctctgacccacgttatcacgcgcccatttatagccatacagatccgcatccatgttgctgttcagacgcggacggctacagctcgtttcacgctgaatatggctcataacaccccttgtattactgtttatgtaagcagacagttttattgttcatgatgatatatttttatcttgtgcaatgtaacatcagagattttgagacacaaatttaaatcgtaattattggggacccctggattctcaccaataaaaaacgcccggcggcaaccgagcgttctgaacaaatccagatggagttctgaggtcattactggatctatcaacaggagtccaaaggcat

SEQ ID NO: 265 - DNA, 110 bp, Artificial sequence
  synthetic
  misc_feature (1)..(110): oriT
acggccagcctcgcagagcaggattcccgttgagcaccgccaggtgcgaataagggacagtgaagaaggaacacccgctcgcgggtgggcctacttcacctatcctgccc

SEQ ID NO: 266 - DNA, 13274 bp, Artificial sequence
  synthetic
  misc_feature (1)..(13274): plasmid pSO7
acgccagggttttcccagtcacgacgttgtaaaacgacggccagttgatcagtcatccaagtggggatcaggaagaagttgataaagtgattcaaaaactcgaggagctcaacacagcgatgaacccaattttgagagcaacactgacgaagaactatgacgcgagggtaggcactaccttgaagctatccacctgcctgcctgccgcctatttccatgtgcagtaggaacgtgtgtaggtataggcaggcattatcgcgtctcctttcgaactacctagtacctagtaggtagtttgaagggaggcgcgataatgcctgcctatgtctacacatgtgcctactgcgcatggaaataggcggtagtcaggcaggtagatagcctcataaaattcaatacttccttttcagaaagaatgctggaatgtattcaaagaggagtcactcttcccattgctcagagaatatgaagagttgctcggcgagcaaaagttcatgattggagatcgatattcatgggctgacatcgctgtcgtcgagtttctaactcggtgtcagcagtgctacgatagcttctatctggctcatttcgagaggctccgaactttttgccagacttttgagtctcttccgcacattcgtccctacattcagggacgtgttgattcatttatctaattttttaaaatggatatttttcgttttttatttgtttgttttgctgataattcaataaagttacgcaacgaattttagacatttatgaaaaccgaaaatcgacaaaaatattttaagaaaaatagcagcaaaattcaatattttatcaaattttgtttatggtaatgagaaagaaaacatacaatatttttctaagaagaagaaaaatgaccagaattttaagatttttctcgaatatacgaaaaattgataaactaaaattttcgatttttccatttattttgaaaaaaaaactcttgacggttttcatcatgcgaagaggtgagaaatattctgaaagttatgcattttgaaaaaattgcaaaaaaatacgttaaaattttttgatctattgtttttttttgaaaaccggaatttaaaatggaattttttttcaaaaattaaaattaaaatttaaatatttctagtgtttggatagtttttcaaaagctagatttaacccgcgagatgtcgaccgctagtgtagcttacagatggctgaagacttcgcaaaaatcttatcttagaaacccgcgaggtgtcggccgctaaaactttgtaaacctgccaacaaaatgcttcgcattgtctgaacagatgaaaccttgaaacaaaacatatacaattgaaatcccgtaaagtgtcgggcgcaagaactgcgattagttgtataattggactagctcaaatttgaccaaaatctcatttttagacctctaagatgtcggccactataactttattcaacttgaaactgcaaaaaaacttatcaactgtatagattcaagtattatgtcaagtattggttttagagctacagtacactctgataacaaaatctgcagaaatacctccctgtcaattcccaaaatacggtagcaaactcacttcgtataacttcgtatagtataccttatacgaagttatctgccctcgattgtctatcttccattctcaccaagtttcaacaactttattcagtcattcttctctggttcatttcccaaccaatcttcccgaataaagcccatctgtcctttcggccacattcctcacctacatccgtactccttatctcccgttcttatccagtcttttatcgtctctgcgtctcgcacactgtctcgtcggtaatgtaaaaaaaaaacaaaaaaaacttgaaaacttgcggaaagatttcctaataaaaggagacgaatccggtaggaaatcgacaagtctctgcttctcgaagactaggtgagttacatttctttggccgaattattttgaaatcctaaatttgataatttcagagatgtctgtaaaacttgcgtgttatgtgacggcttcggtcactgtcgccactcttatggtatgcttcatgaccatgtcaaccatctactcggaggttgatggattcagagagaagcttgataccgagatgaatgtgttcagagtgagttaaattatattttgaattttaaataatttttaattttctagcaatctaccaatggattgtggaaggacatagttgtcatcggaagatctagcaagcgtgtccgttgtcaatatgaagagaccaacgctaccccaactccacatgctgatggatccccatctgctccaccaggtcaaccaccagcagttccaccagtcttcaaccagccaaagactccaaatggagccaatggaaatggaccaacctgcaactgcaatgctgataacaagtgcccagctggaccatccggaccaaagggagttccaggagttccaggactcgacggagttccaggacttgacggtgttccaggagttggagctgatgatatcgctccacaacgcgagtctgtcggatgcttcacttgcccacaaggaccagttggaccaccaggagctcttggaagaccaggaccacgtggacttccaggaccaagaggacaaaatggaaacccaggaagagatggacaaccaggacatccaggagagcaaggatcatccggtcaaatcggaaagatcggagagccaggaccaccaggagagaagggacgcgacgccgagcatccaatcggaagaccaggaccaaagggaccaagaggagatcaaggaccaacaggaccagctggacagaacggtcttcacggaccaccaggagagccaggaaccgttggaccagaaggaccatctggaaagcaaggacgtcaaggaccagacggaacccagggagagactggaccagacggaagaccaggaaaggatgccgagtactgccagtgcccagacaagtctccaccatcagaggctgtcaacgccaaccgtggatacagaaatatctaaattgttggtgttttctaataaaatatttgagattcagtgagacttttttcttggcggcacaataaagtttcctctttttgttgggtcactcaacgaacacaatacaaatatttgagcgctcgcatttttctcaacctttcgggtttaaagcacttcaaaatggaattgaagagagattgtgaaagtacatcagacagaatcacattttgatagcattcacttcactcagatgcaaacttttcagtgactataaaaagtcataaaataataacattaaaaaagcaaataaattagcgagagaattttttgacaaaaagaaagaatagtgatagagaagaagggaatgcttgaaaggattttgcatttatcttaatcaccgtcttcgagaagacgaaccatggcgccagtttcagaatccaagtttctaatatagttcatcacaatgttgacgttggtccaacctccggcttgcataatctctgggatggaaactccagcgcgagccatgtcacgggcagctccgacacgggcggaatgtccagaccaagccaagtaacgttgtccggaatcatccttggctccgtagatgagacggtgggtagcttcgaagattcctgaaaatttattttcagcttattcttagctaatatgttgtttaaacttaccttcaagagctcgagtcgagagttgtgatgttgcactcggggcagcaactccgttcttgcgaacacgacagaacaggtagttgtttggatcatcggcgactccggaaaccgaaatccagcgctcaacgagcttggtaactccaagggagagcgctttttcgactccggcagtcgagaccagcgtttttgtacgtccgatgtggatgagcattcttcctccgtctgtgcgactaatatccttgacgcgaatgcgggcaatttcggcgatacggagaagtgtgttgtaagcaattccgaggaaggcgaggtttcggatgtcctggcaacgatcggaattttccataagagaacggacctgatcgaagtcggttctgaaaatttcgtcaagtcttaggattgaatacattaatatttaaacttacctttcgaaggcgagggcttgcttggctctctctccagcatcaacattttccttgcggatacgtctcattacgagagatacggcattagaatctgatgggcgtggaagtccagatcggcgatggagcatattgagctgtccgagatgttgttggatcgtcttcaccgccaatccacgagcttggaggtagagcaagtagtcacgaacgtcttctggctcggctgggaaccacttgcggttgttaagcttgcaccaggcagcccaagaacggcacactgagagaagcatcttccaggtgtgctcggagaaggcttgtctgtcacggaacatatccatgaggttcttgcgaacttcatcacttgtcgcgtcaactggaagtgctggaagattttgatgaacagtgagaagatttgacatattttcgaagttttttagatgcactagaacaaagcgtgttggcttcctctgagcccgctttccttatatacccgcattctgcagccttacagaatgttctagaaggtcctagatgcattcgtttgaaaatactcccggtgggtgcaaagagacgcagacggaaaatgtatctgggtctctttattgtgtacactacttttccatgtaccgaatgtgagtcgccctccttttgcaacaagcagctcgaatgttctagaaaaaggtggaaaatagtataaataccgttgaaaataaataccgaacaacatttgctctaattgtgaaattagaaatcttcaaactataatcatgtcactttaccactatttccgtccagctcaacgttccgtttttggtgatcatttttgctttcgtcgtaaatctacacacgcgtctcttccgtgcgagagtccaagccagcagccaaattcgttgactgagtattcaacgtttatacgttgtcggcaacgagaaataggaaaatgcatcgggaaatgttcttttttcgattttttccaaggttttgacaaattttaccacgaattttgctatgttttcaattaaaaaatatgttattcaactgtttctatgaggaaaataaggctttgcatgtaattttcttattcagcataatttttaattaatttgaattttctgtcctaacgtttattttgttttcttggttatgactgatctgaaattaatttttgaattttaaggtaatatgtcaggcggtgccgcaagtttgtacaaaaaagcaggctccatgaaaaagcctgaactcaccgcgacgtctgtcgagaagtttctgatcgaaaagttcgacagcgtctccgacctgatgcagctctcggagggcgaagaatctcgtgctttcagcttcgatgtaggagggcgtggatatgtcctgcgggtaaatagctgcgccgatggtttctacaaagatcgttatgtttatcggcactttgcatcggccgcgctcccgattccggaagtgcttgacattggggaattcagcgagagcctgacctattgcatctcccgccgtgcacagggtgtcacgttgcaagacctgcctgaaaccgaactgcccgctgttctgcagccggtcgcggaggccatggatgcgatcgctgcggccgatcttagccagacgagcgggttcggcccattcggaccgcaaggaatcggtcaatacactacatggcgtgatttcatatgcgcgattgctgatccccatgtgtatcactggcaaactgtgatggacgacaccgtcagtgcgtccgtcgcgcaggctctcgatgagctgatgctttgggccgaggactgccccgaagtccggcacctcgtgcacgcggatttcggctccaacaatgtcctgacggacaatggccgcataacagcggtcattgactggagcgaggcgatgttcggggattcccaatacgaggtcgccaacatcttcttctggaggccgtggttggcttgtatggagcagcagacgcgctacttcgagcggaggcatccggagcttgcaggatcgccgcggctccgggcgtatatgctccgcattggtcttgaccaactctatcagagcttggttgacggcaatttcgatgatgcagcttgggcgcagggtcgatgcgacgcaatcgtccgatccggagccgggactgtcgggcgtacacaaatcgcccgcagaagcgcggccgtctggaccgatggctgtgtagaagtactcgccgatagtggaaaccgacgccccagcactcgtccgagggcaaaggaatagacccagctttcttgtacaaagtgggtccaattactcttcaacatccctacatgctctttctccctgtgctcccaccccctatttttgttattatcaaaaaacttctcttaatttctttgttttttagcttcttttaagtcacctctaacaatgaaattgtgtagattcaaaaatagaattaattcgtaataaaaagtcgaaaaaaattgtgctccctccccccattaataataattctatcccaaaatctacacaatgttctgtgtacacttcttatgttttttacttctgataaatttttttgaaacatcatagaaaaaaccgcacacaaaataccttatcatatgttacgtttcagtttatgaccgcaatttttaataacttcgtatagtataccttatacgaagttatactagtatatatttttatgttttcttttaaaccttcctccatatttctgaattgaatgttgttgcatattgtgtgtccttatttcatttccatcatccttttgtgtgtttcccccttccaccaattccccccacgtcctaatgaaatgaaagcgagaagataaataaacttgcacattgtgttcagatgagaggagcggaatacgaattgggagacggaaagagaaaaaaaaatgtttagatttggattgaattaattttttagaaagcaagaaaaaaaacacaaagagaataaataaataataggaaaaaaaacaaatattcagtatttaaaatttgaaaattcaacgacgttggcgtcgatcatcctgtaaaacgacggccagtgccatttgaaaatttgcaccaatgtattatttaattttttttttcgaaaatttaacgcattttctctctaaaaactcgaaatttagtgtgttctaaacaacagtaagcatacaatacctttgttcaaaattgacgtgctttctgaaccaatatggttagtttcaaaaatttttgtattataggatagaaatatttggaaataaattttaaaaccaaacttatgcctttctcttttagtatcccagctaggtaatattttagtatttgcccaaatccttgaagtaaggagtatataatttttgaaaaacaataaaactccagataattcatagttttttctcgaaagaaaatttttgagattagttattgaacttcatttttgaacattattcgttgaaaaacactcgctttgtctttattttcaaaaaaattccgatttccccaaccagaaaaaaaaacagatagaagaaatttctccttaaatttcattgtccatctctcttggaaacacattatctatcaaatgaaaaacgcattttttttcctggcagaaaaatgaaattggttagattacactggttaggtttgaaggtgtaactttcgctttctcagcaactttcagtataaaaggaaacggtcaccatttagaaagacatcagttcatcaacatgcccataaaaaagccctgtctaaaactaaatttagattctttgaatgttgtgaagtctgaaataccgcagatgctttctgcgaatgaaagattgaaaaataacttcaatatattgtacaaccaaatacggcaatacccagcgtactatttcaaagtagcatcgaacgtgccaacttactctgatatatgtcaatttttttctgtcatgtaccaaggattccagattgtgaaccatagtggagatgtgtttattcatgcatgtcgtgaaaatcctcagagtaagggggattttgttggggacaagtttcatattagtatagctagggagcaagttcctctggcattccaaattttgtctggtttattattttcagaggacagtcctatagataaatggaagataactgatatgaatcgagtttctcagcaatctcgtgtggggataggagctcagtttacgctatatgtaaaatcagatcaggaatgctcgcaatatagtgctttattacttcataaaatacgacaatttataatgtgtctcgagtctaatctattaagaagcaaaatcgctcccggggagtatccggcgtcagatgttagacctgaagactggaaatatgtcagctatcgtaatgaactacgaagcgatcgagatggaagtgaaaggcaagagcaaatgttacgagaggaaccattttatcgattgatgatagagtagcatctcgcgcccgtgcctctgacttctaagtccaattactcttcaacatccctacatgctctttctccctgtgctcccaccccctatttttgttattatcaaaaaacttctcttaatttctttgttttttagcttcttttaagtcacctctaacaatgaaattgtgtagattcaaaaatagaattaattcgtaataaaaagtcgaaaaaaattgtgctccctccccccattaataataattctatcccaaaatctacacaatgttctgtgtacacttcttatgttttttacttctgataaatttttttgaaacatcatagaaaaaaccgcacacaaaataccttatcatatgttacgtttcagtttatgaccgcaatttttatttcttcgcacgtctgggcctctcatgacgtcaaatcatgctcatcgtgaaaaagttttggagtatttttggaatttttcaatcaagtgaaagtttatgaaattaattttcctgcttttgctttttggggtttcccctattgtttgtcaagatttcgaggacggcgtttttcttgctaaaatcacaagtattgatgagcacgatgcaagaaagatcggaagaaggtttgggtttgaggctcagtggaaggtgagtcgatgcgcgatgcaagtcggcgatttctttgaagttttgtcaaaagaagagacaaggacttgatagatacgctcatcagagtgagattcattgcaaatagtgtgtaaatcgtggagagacgagagaaaaggtgtgagaagcttagaagataaagaataggaagaagaacatatctcatttcctattttctctaatttttcgttcatttttctagacattacccatttgatggtttttcaatatggttatcagggtactcattttggtagttttcaaagcaatttggagtttttttttaaattgtcaactacaaaaacgcagcttaaaggtccaaatatcatagtataaaaattctttaaaaaattccaaattttatatgattttttgaaaattggaagaatgttagtttttgccatttttttggaagtttttctccggattttatggtacttatatttcaaatataaatttttgtaggaattcgagtatgcgagagagctatagtttactaaaaaaaagtggcaaaaactcagtaattgccacttttttcaaaaatgttttgaaaaattttactatgatatttggccattttggcaccatatgtacgttactttttacgaaacactctaatttttgaaatttgagtttcatgtttaatcttttgtataaaatttttatggtccttttgtgacaggataaaaaattgcaaaaaaatagaaaactttgtttcgtgaaaacacctagtttaaaaattgtgggccacttagcgattctagtcaaaaatcagacaaatgtcagctgccgtaactttttccggatcagggttatcaaattttaattttaattgtaaatgtagaaaaatgatcggcaacattttgctaattgaaaatattttgaaaattgctatagtacatattaatctagtattaatatagtattaatgttataatatcagttatgtgtttgaataactcaagcgtaagtttccgtaaaatatctttaaattttggtaattttttacggtttggtataaatttttgcattttttgattttctacactttttttcgatttcgcattttccgaatttctctgaaataaatcgaacaatcggaaaattttcgagggcacccttagccatgcagctcaggaatttgactttatgttcccattcaaatttttttaaaattaaataaaatgctaattgtaagataaattacaaaaattattaaatctcatcatccttatgatgatagtgcagtgcatgaatatatttttccaaataggatatgattcgtcgagtagcttcacgtaatccgttttcttcaatcaccatttcgaactgcaattttttttttggatttttgtaacaatattgtcataaattgtgattttgatattttgcgtagagcatcagaacctttctgctttgaattttaatgggattaaaaattataaaaaacttgcaccctaattaaagcgcgatacctggtgacccatggtcatagctgtttcctgtgtgaaattgttatccgctcacaattccacacaacatacgagccggaagcataaagtgtaaagcctggggtgcctaatgagtgagctaactcacattacatgtgagcaaaaggccagcaaaaggccaggaaccgtaaaaaggccgcgttgctggcgtttttccataggctccgcccccctgacgagcatcacaaaaatcgacgctcaagtcagaggtggcgaaacccgacaggactataaagataccaggcgtttccccctggaagctccctcgtgcgctctcctgttccgaccctgccgcttaccggatacctgtccgcctttctcccttcgggaagcgtggcgctttctcatagctcacgctgtaggtatctcagttcggtgtaggtcgttcgctccaagctgggctgtgtgcacgaaccccccgttcagcccgaccgctgcgccttatccggtaactatcgtcttgagtccaacccggtaagacacgacttatcgccactggcagcagccactggtaacaggattagcagagcgaggtatgtaggcggtgctacagagttcttgaagtggtggcctaactacggctacactagaagaacagtatttggtatctgcgctctgctgaagccagttaccttcggaaaaagagttggtagctcttgatccggcaaacaaaccaccgctggtagcggtggtttttttgtttgcaagcagcagattacgcgcagaaaaaaaggatctcaagaagatcctttgatcttttctacggggtctgacgctcagtggaacgaaaactcacgttaagggattttggtcatgagattatcaaaaaggatcttcacctagatccttttacgcgccctgtagcggcgcattaagcgcggcgggtgtggtggttacgcgcagcgtgaccgctacacttgccagcgccctagcgcccgctcctttcgctttcttcccttcctttctcgccacgttcgctttccccgtcaagctctaaatcgggggctccctttagggttccgatttagtgctttacggcacctcgaccccaaaaaacttgatttgggtgatggttcacgtagtgggccatcgccctgatagacggtttttcgccctttgacgttggagtccacgttctttaatagtggactcttgttccaaactggaacaacactcaaccctatctcgggctattcttttgatttataagggattttgccgatttcggcctattggttaaaaaatgagctgatttaacaaaaatttaacgcgaattttaacaaaatattaacgtttacaatttaaatatttgcttatacaatcttcctgtttttggggcttttctgattatcaaccggggtaaatcaatctaaagtatatatgagtaaacttggtctgacagttaccaatgcttaatcagtgaggcacctatctcagcgatctgtctatttcgttcatccatagttgcctgactccccgtcgtgtagataactacgatacgggagggcttaccatctggccccagtgctgcaatgataccgcgagacccacgctcaccggctccagatttatcagcaataaaccagccagccggaagggccgagcgcagaagtggtcctgcaactttatccgcctccatccagtctattaattgttgccgggaagctagagtaagtagttcgccagttaatagtttgcgcaacgttgttgccattgctacaggcatcgtggtgtcacgctcgtcgtttggtatggcttcattcagctccggttcccaacgatcaaggcgagttacatgatcccccatgttgtgcaaaaaagcggttagctccttcggtcctccgatcgttgtcagaagtaagttggccgcagtgttatcactcatggttatggcagcactgcataattctcttactgtcatgccatccgtaagatgcttttctgtgactggtgagtactcaaccaagtcattctgagaatagtgtatgcggcgaccgagttgctcttgcccggcgtcaacacgggataataccgcgccacatagcagaactttaaaagtgctcatcattgggaaacgttcttcggggcgaaaactctcaaggatcttaccgctgttgagatccagttcgatgtaacccactcgtgcacccaactgatcttcagcatcttttactttcaccagcgtttctgggtgagcaaaaacaggaaggcaaaatgccgcaaaaaagggaataagggcgacacggaaatgttgaatactcatactcttcctttttcaatattattgaagcatttatcagggttattgtctcatgagcggatacatatttgaatgtatttagaaaaataaacaaataggggttccgcgcacatttccccgaaaagtgccacctgacgtagttaacaaaaaaaagcccgccgaagcgggctttattaccaagcgaagcgccattcgccattcaggctgcgcaactgttgggaagggcgatcggtgcgggcctcttcgctattacgccagctggcgaaagggggatgtgctgcaaggcgattaagttgggta

SEQ ID NO: 267 - DNA, 2686 bp, Artificial sequence
  synthetic
  misc_feature (1)..(2686): plasmid pUC19
gagatacctacagcgtgagctatgagaaagcgccacgcttcccgaagggagaaaggcggacaggtatccggtaagcggcagggtcggaacaggagagcgcacgagggagcttccagggggaaacgcctggtatctttatagtcctgtcgggtttcgccacctctgacttgagcgtcgatttttgtgatgctcgtcaggggggcggagcctatggaaaaacgccagcaacgcggcctttttacggttcctggccttttgctggccttttgctcacatgttctttcctgcgttatcccctgattctgtggataaccgtattaccgcctttgagtgagctgataccgctcgccgcagccgaacgaccgagcgcagcgagtcagtgagcgaggaagcggaagagcgcccaatacgcaaaccgcctctccccgcgcgttggccgattcattaatgcagctggcacgacaggtttcccgactggaaagcgggcagtgagcgcaacgcaattaatgtgagttagctcactcattaggcaccccaggctttacactttatgcttccggctcgtatgttgtgtggaattgtgagcggataacaatttcacacaggaaacagctatgaccatgattacgccaagcttgcatgcctgcaggtcgactctagaggatccccgggtaccgagctcgaattcactggccgtcgttttacaacgtcgtgactgggaaaaccctggcgttacccaacttaatcgccttgcagcacatccccctttcgccagctggcgtaatagcgaagaggcccgcaccgatcgcccttcccaacagttgcgcagcctgaatggcgaatggcgcctgatgcggtattttctccttacgcatctgtgcggtatttcacaccgcatatggtgcactctcagtacaatctgctctgatgccgcatagttaagccagccccgacacccgccaacacccgctgacgcgccctgacgggcttgtctgctcccggcatccgcttacagacaagctgtgaccgtctccgggagctgcatgtgtcagaggttttcaccgtcatcaccgaaacgcgcgagacgaaagggcctcgtgatacgcctatttttataggttaatgtcatgataataatggtttcttagacgtcaggtggcacttttcggggaaatgtgcgcggaacccctatttgtttatttttctaaatacattcaaatatgtatccgctcatgagacaataaccctgataaatgcttcaataatattgaaaaaggaagagtatgagtattcaacatttccgtgtcgcccttattcccttttttgcggcattttgccttcctgtttttgctcacccagaaacgctggtgaaagtaaaagatgctgaagatcagttgggtgcacgagtgggttacatcgaactggatctcaacagcggtaagatccttgagagttttcgccccgaagaacgttttccaatgatgagcacttttaaagttctgctatgtggcgcggtattatcccgtattgacgccgggcaagagcaactcggtcgccgcatacactattctcagaatgacttggttgagtactcaccagtcacagaaaagcatcttacggatggcatgacagtaagagaattatgcagtgctgccataaccatgagtgataacactgcggccaacttacttctgacaacgatcggaggaccgaaggagctaaccgcttttttgcacaacatgggggatcatgtaactcgccttgatcgttgggaaccggagctgaatgaagccataccaaacgacgagcgtgacaccacgatgcctgtagcaatggcaacaacgttgcgcaaactattaactggcgaactacttactctagcttcccggcaacaattaatagactggatggaggcggataaagttgcaggaccacttctgcgctcggcccttccggctggctggtttattgctgataaatctggagccggtgagcgtgggtctcgcggtatcattgcagcactggggccagatggtaagccctcccgtatcgtagttatctacacgacggggagtcaggcaactatggatgaacgaaatagacagatcgctgagataggtgcctcactgattaagcattggtaactgtcagaccaagtttactcatatatactttagattgatttaaaacttcatttttaatttaaaaggatctaggtgaagatcctttttgataatctcatgaccaaaatcccttaacgtgagttttcgttccactgagcgtcagaccccgtagaaaagatcaaaggatcttcttgagatcctttttttctgcgcgtaatctgctgcttgcaaacaaaaaaaccaccgctaccagcggtggtttgtttgccggatcaagagctaccaactctttttccgaaggtaactggcttcagcagagcgcagataccaaatactgttcttctagtgtagccgtagttaggccaccacttcaagaactctgtagcaccgcctacatacctcgctctgctaatcctgttaccagtggctgctgccagtggcgataagtcgtgtcttaccgggttggactcaagacgatagttaccggataaggcgcagcggtcgggctgaacggggggttcgtgcacacagcccagcttggagcgaacgacctacaccgaact

SEQ ID NO: 268 - DNA, 9352 bp, Artificial sequence
  synthetic
  misc_feature (1)..(9352): plasmid pSW002-Pc-TorA(sp)-mTurquoise2
gatccaacccctccgctgctatagtgcagtcggcttctgacgttcagtgcagccgtcttctgaaaacgacatgtcgcacaagtcctaagttacgcgacaggctgccgccctgcccttttcctggcgttttcttgtcgcgtgttttagtcgcataaagtagaatacttgcgactagaaccggagacattacgccatgaacaagagcgccgccgctggcctgctgggctatgcccgcgtcagcaccgacgaccaggacttgaccaaccaacgggccgaactgcacgcggccggctgcaccaagctgttttccgagaagatcaccggcaccaggcgcgaccgcccggagctggccaggatgcttgaccacctacgccctggcgacgttgtgacagtgaccaggctagaccgcctggcccgcagcacccgcgacctactggacattgccgagcgcatccaggaggccggcgcgggcctgcgtagcctggcagagccgtgggccgacaccaccacgccggccggccgcatggtgttgaccgtgttcgccggcattgccgagttcgagcgttccctaatcatcgaccgcacccggagcgggcgcgaggccgccaaggcccgaggcgtgaagtttggcccccgccctaccctcaccccggcacagatcgcgcacgcccgcgagctgatcgaccaggaaggccgcaccgtgaaagaggcggctgcactgcttggcgtgcatcgctcgaccctgtaccgcgcacttgagcgcagcgaggaagtgacgcccaccgaggccaggcggcgcggtgccttccgtgaggacgcattgaccgaggccgacgccctggcagccgccgagaatgaacgccaagaggaacaagcatgaaaccgcaccaggacggccaggacgaaccgtttttcattaccgaagagatcgaggcggagatgatcgcggccgggtacgtgttcgagccgcccgcgcacgtctcaaccgtgcggctgcatgaaatcctggccggtttgtctgatgccaagctggcggcctggccggccagcttggccgctgaagaaaccgagcgccgccgtctaaaaaggtgatgtgtatttgagtaaaacagcttgcgtcatgcggtcgctgcgtatatgatgcgatgagtaaataaacaaatacgcaaggggaacgcatgaaggttatcgctgtacttaaccagaaaggcgggtcaggcaagacgaccatcgcaacccatctagcccgcgccctgcaactcgccggggccgatgttctgttagtcgattccgatccccagggcagtgcccgcgattgggcggccgtgcgggaagatcaaccgctaaccgttgtcggcatcgaccgcccgacgattgaccgcgacgtgaaggccatcggccggcgcgacttcgtagtgatcgacggagcgccccaggcggcggacttggctgtgtccgcgatcaaggcagccgacttcgtgctgattccggtgcagccaagcccttacgacatatgggccaccgccgacctggtggagctggttaagcagcgcattgaggtcacggatggaaggctacaagcggcctttgtcgtgtcgcgggcgatcaaaggcacgcgcatcggcggtgaggttgccgaggcgctggccgggtacgagctgcccattcttgagtcccgtatcacgcagcgcgtgagctacccaggcactgccgccgccggcacaaccgttcttgaatcagaacccgagggcgacgctgcccgcgaggtccaggcgctggccgctgaaattaaatcaaaactcatttgagttaatgaggtaaagagaaaatgagcaaaagcacaaacacgctaagtgccggccgtccgagcgcacgcagcagcaaggctgcaacgttggccagcctggcagacacgccagccatgaagcgggtcaactttcagttgccggcggaggatcacaccaagctgaagatgtacgcggtacgccaaggcaagaccattaccgagctgctatctgaatacatcgcgcagctaccagagtaaatgagcaaatgaataaatgagtagatgaattttagcggctaaaggaggcggcatggaaaatcaagaacaaccaggcaccgacgccgtggaatgccccatgtgtggaggaacgggcggttggccaggcgtaagcggctgggttgtctgccggccctgcaatggcactggaacccccaagcccgaggaatcggcgtgagcggtcgcaaaccatccggcccggtacaaatcggcgcggcgctgggtgatgacctggtggagaagttgaaggccgcgcaggccgcccagcggcaacgcatcgaggcagaagcacgccccggtgaatcgtggcaagcagccgctgatcgaatccgcaaagaatcccggcaaccgccggcagccggtgcgccgtcgattaggaagccgcccaagggcgacgagcaaccagattttttcgttccgatgctctatgacgtgggcacccgcgatagtcgcagcatcatggacgtggccgttttccgtctgtcgaagcgtgaccgacgagctggcgaggtgatccgctacgagcttccagacgggcacgtagaggtttccgcagggccggccggcatggccagtgtgtgggattacgacctggtactgatggcggtttcccatctaaccgaatccatgaaccgataccgggaagggaagggagacaagcccggccgcgtgttccgtccacacgttgcggacgtactcaagttctgccggcgagccgatggcggaaagcagaaagacgacctggtagaaacctgcattcggttaaacaccacgcacgttgccatgcagcgtacgaagaaggccaagaacggccgcctggtgacggtatccgagggtgaagccttgattagccgctacaagatcgtaaagagcgaaaccgggcggccggagtacatcgagatcgagctagctgattggatgtaccgcgagatcacagaaggcaagaacccggacgtgctgacggttcaccccgattactttttgatcgatcccggcatcggccgttttctctaccgcctggcacgccgcgccgcaggcaaggcagaagccagatggttgttcaagacgatctacgaacgcagtggcagcgccggagagttcaagaagttctgtttcaccgtgcgcaagctgatcgggtcaaatgacctgccggagtacgatttgaaggaggaggcggggcaggctggcccgatcctagtcatgcgctaccgcaacctgatcgagggcgaagcatccgccggttcctaatgtacggagcagatgctagggcaaattgccctagcaggggaaaaaggtcgaaaaggtctctttcctgtggatagcacgtacattgggaacccaaagccgtacattgggaaccggaacccgtacattgggaacccaaagccgtacattgggaaccggtcacacatgtaagtgactgatataaaagagaaaaaaggcgatttttccgcctaaaactctttaaaacttattaaaactcttaaaacccgcctggcctgtgcataactgtctggccagcgcacagccgaagagctgcaaaaagcgcctacccttcggtcgctgcgctccctacgccccgccgcttcgcgtcggcctatcgcggccgatggccgctcaaaaatggctggcctacggccaggcaatctaccagggcgcggacaagccgcgccgtcgccactcgaccgccggcgctgaggtctgcctcgtgaagaaggtgttgctgactcataccaggcaatggcaacaacgttgcgcaaactattaactggcgaactacttactctagcttcccggcaacaattaatagactggatggaggcggataaagttgcaggaccacttctgcgctcggcccttccggctggctggtttattgctgataaatctggagccggtgagcgtgggtctcgcggtatcattgcagcactggggccagatggtaagccctcccgtatcgtagttatctacacgacggggagtcaggcaactatggatgaacgaaatagacagatcgctgagataggtgcctcactgattaagcattggtaactgtcagaccaagtttactcatatatactttagattgatttaaaacttcatttttaatttaaaaggatctaggtgaagatcctttttgataatctcatgaccaaaatcccttaacgtgagttttcgttccactgagcgtcagaccccttaataagatgatcttcttgagatcgttttggtctgcgcgtaatctcttgctctgaaaacgaaaaaaccgccttgcagggcggtttttcgaaggttctctgagctaccaactctttgaaccgaggtaactggcttggaggagcgcagtcaccaaaacttgtcctttcagtttagccttaaccggcgcatgacttcaagactaactcctctaaatcaattaccagtggctgctgccagtggtgcttttgcatgtctttccgggttggactcaagacgatagttaccggataaggcgcagcggtcggactgaacggggggttcgtgcatacagtccagcttggagcgaactgcctacccggaactgagtgtcaggcgtggaatgagacaaacgcggccataacagcggaatgacaccggtaaaccgaaaggcaggaacaggagagcgcacgagggagccgccagggggaaacgcctggtatctttatagtcctgtcgggtttcgccaccactgatttgagcgtcagatttcgtgatgcttgtcaggggggcggagcctatggaaaaacggctttgccgcggccctctcacttccctgttaagtatcttcctggcatcttccaggaaatctccgccccgttcgtaagccatttccgctcgccgcagtcgaacgaccgagcgtagcgagtcagtgagcgaggaagcggaatatatcctgtatcacatattctgctgacgcaccggtgcagccttttttctcctgccacatgaagcacttcactgacaccctcatcagtgccaacatagtaagccagtatacactccgctagcgctgaggtctgcctcgtgaagaaggtgttgctgactcataccaggtagtccgaggagctttatgcttgtaaaccgttttgtgaaaaaatttttaaaataaaaaaggggacctctagggtccccaattaattagtaatataatctattaaaggtcattcaaaaggtcatccaccggatcaattcccctgctcgcgcaggctgggtgccaagctctcgggtaacatcaaggcccgatccttggagcccttgccctcccgcacgatgatcgtgccgtgatcgaaatccagatccttgacccgcagttgcaaaccctcactgatccgctagtccgaggcctcgagatgcttaaagcttagtgatggtgatgatgatgtgcggccgcttacgccttgtacagctcgtccatgcccagggtgatgccggccgcggtcacgaactccagcagaaccatgtggtcgcgtttttcgttaggatctttactgagtttactttgggtggagaggtaatggttgtcaggcagcagaacggggccgtcgccgatgggggtattttgttgataatggtctgcgagttgaacaccgccgtcttcgatattatggcggattttaaaattagctttgatgccgtttttctgtttgtcagcggtgatgtaaacgttgtcggagaaatagttgtattcgagtttgtggcccaggatgttaccgtcttccttaaaatcaatgcccttcagttcgatgcggttgaccagggtatcgccttcgaatttcacttcggcccgagttttgtagttgccgtcgtctttgaagaaaatggtgcgttcttgaacatagccttctggcatggcgcttttgaagaaatcgtgttgtttcatatggtcggggtaacgggcaaagcattggacgccccagctcaaggtggtcacgagggtaggccaaggaacagggagtttgccggtagtgcagataaatttcagggtcagtttgccgtaagttgcatcgccctcgccttcgccgctcacggaaaatttatggccattcacgtcgccatcgagttccacgaggattggcacaacgccggtaaagagctcttcgcccttggaattcgccgcttgcgccgcagtcgcacgtcgcggcgttaacaatgacggccccagcatcccggcgacggttaagccgccgagttgtgccagaaaacgccgacgtgatgcctgaaagagatcgttattgttcatatgtatatctccttcttaaagttaaacaaaattatttcttgaacgggttcgctacctgcattacagcctacagaccgagaaggcttatgtctactgggccaaggcatttgtgttgtggacggcccgcagccttggtgggtttcgacatccgcgcgaaatggggcaagctgaagtcgagggttttctgaccatgctcgccaccgagaagcaagtggcgccggccacccaccggcaggcgctcaacgcgctgttgttcttgtatcggcaacgcgtcgacgtcatatggatccgatatcgccgtggcggccagcttttgccattctcaccggattcagtcgtcactcatggtgatttctcacttgataaccttatttttgacgaggggaaattaataggttgtattgatgttggacgagtcggaatcgcagaccgataccaggatcttgccatcctatggaactgcctcggtgagttttctccttcattacagaaacggctttttcaaaaatatggtattgataatcctgatatgaataaattgcagtttcatttgatgctcgatgagtttttctaatcagaattggttaattggttgtaacactggcagagcattacgctgacttgacgggacggcggctttgttgaataaatcgaacttttgctgagttgaaggatcagatcacgcatcttcccgacaacgcagaccgttccgtggcaaagcaaaagttcaaaatcaccaactggtccacctacaacaaagctctcatcaaccgtggctccctcactttctggctggatgatggggcgattcaggcctggtatgagtcagcaacaccttcttcacgaggcagacctcagcgccagaaggccgccagagaggccgagcgcggccgtgaggcttggacgctagggcagggcatgaaaaagcccgtagcgggctgctacgggcgtctgacgcggtggaaagggggaggggatgttgtctacatggctctgctgtagtgagtgggttgcgctccggcagcggtcctgatcaatcgtcaccctttctcggtccttcaacgttcctgacaacgagcctccttttcgccaatccatcgacaatcaccgcgagtccctgctcgaacgctgcgtccggaccggcttcgtcgaaggcgtctatcgcggcccgcaacagcggcgagagcggagcctgttcaacggtgccgccgcgctcgccggcatcgctgtcgccggcctgctcctcaagcacggccccaacagtgaagtagctgattgtcatcagcgcattgacggcgtccccggccgaaaaacccgcctcgcagaggaagcgaagctgcgcgtcggccgtttccatctgcggtgcgcccggtcgcgtgccggcatggatgcgcgcgccatcgcggtaggcgagcagcgcctgcctgaagctgcgggcattcccgatcagaaatgagcgccagtcgtcgtcggctctcggcaccgaatgcgtatgattctccgccagcatggcttcggccagtgcgtcgagcagcgcccgcttgttcctgaagtgccagtaaagcgccggctgctgaacccccaaccgttccgccagtttgcgtgtcgtcagaccgtctacgccgacctcgttcaacaggtccagggcggcacggatcactgtattcggctgcaactttgtcatgcttgacactttatcactgataaacataatatgtccaccaacttatcagtgataaagaatccgcgcgttcaatcggaccagcggaggctggtccggaggccagacgtgaaacccaacatacccctgatcgtaattctgagcactgtcgcgctcgacgctgtcggcatcggcctgattatgccggtgctgccgggcctcctgcgcgatctggttcactcgaacgacgtcaccgcccactatggcattctgctggcgctgtatgcgttggtgcaatttgcctgcgcacctgtgctgggcgcgctgtcggatcgtttcgggcggcggccaatcttgctcgtctcgctggccggcgccactgtcgactacgccatcatggcgacagcgcctttcctttgggttctctatatcgggcggatcgtggccggcatcaccggggcgactggggcggtagccggcgcttatattgccgatatcactgatggcgatgagcgcgcgcggcacttcggcttcatgagcgcctgtttcgggttcgggatggtcgcgggacctgtgctcggtgggctgatgggcggtttctccccccacgctccgttcttcgccgcggcagccttgaacggcctcaatttcctgacgggctgtttccttttgccggagtcgcacaaaggcgaacgccggccgttacgccgggaggctctcaacccgctcgcttcgttccggtgggcccggggcatgaccgtcgtcgccgccctgatggcggtcttcttcatcatgcaacttgtcggacaggtgccggccgcgctttgggtcattttcggcgaggatcgctttcactgggacgcgaccacgatcggcatttcgcttgccgcatttggcattctgcattcactcgcccaggcaatgatcaccggccctgtagccgcccggctcggcgaaaggcgggcactcatgctcggaatgattgccgacggcacaggctacatcctgcttgccttcgcgacacggggatggatggcgttcccgatcatggtcctgcttgcttcgggtggcatcggaatgccggcgctgcaagcaatgttgtccaggcaggtggatgaggaacgtcaggggcagctgcaaggctcactggcggcgctcaccagcctgacctcgatcgtcggacccctcctcttcacggcgatctatgcggcttctataacaacgtggaacgggtgggcatggattgcaggcgctgccctctacttgctctgcctgccggcgctgcgtcgcgggctttggagcggcgcagggcaacgagccgatcgctgatcgtggaaacgataggggccgctctagtactagctagaactat

SEQ ID NO: 269 - DNA, 687 bp, Artificial sequence
  synthetic
  CDS (1)..(687): pVS1 resolvase
atgaacaagagcgccgccgctggcctgctgggctatgcccgcgtcagcaccgacgaccaggacttgaccaaccaacgggccgaactgcacgcggccggctgcaccaagctgttttccgagaagatcaccggcaccaggcgcgaccgcccggagctggccaggatgcttgaccacctacgccctggcgacgttgtgacagtgaccaggctagaccgcctggcccgcagcacccgcgacctactggacattgccgagcgcatccaggaggccggcgcgggcctgcgtagcctggcagagccgtgggccgacaccaccacgccggccggccgcatggtgttgaccgtgttcgccggcattgccgagttcgagcgttccctaatcatcgaccgcacccggagcgggcgcgaggccgccaaggcccgaggcgtgaagtttggcccccgccctaccctcaccccggcacagatcgcgcacgcccgcgagctgatcgaccaggaaggccgcaccgtgaaagaggcggctgcactgcttggcgtgcatcgctcgaccctgtaccgcgcacttgagcgcagcgaggaagtgacgcccaccgaggccaggcggcgcggtgccttccgtgaggacgcattgaccgaggccgacgccctggcagccgccgagaatgaacgccaagaggaacaagcatga

SEQ ID NO: 270 - protein, 228 aa, Artificial sequence
  Synthetic Construct
MNKSAAAGLLGYARVSTDDQDLTNQRAELHAAGCTKLFSEKITGTRRDRPELARMLDHLRPGDVVTVTRLDRLARSTRDLLDIAERIQEAGAGLRSLAEPWADTTTPAGRMVLTVFAGIAEFERSLIIDRTRSGREAAKARGVKFGPRPTLTPAQIAHARELIDQEGRTVKEAAALLGVHRSTLYRALERSEEVTPTEARRRGAFREDALTEADALAAAENERQEEQA

SEQ ID NO: 271 - DNA, 630 bp, Artificial sequence
  synthetic
  misc_feature (1)..(630): pVS1 StaA
atgaaggttatcgctgtacttaaccagaaaggcgggtcaggcaagacgaccatcgcaacccatctagcccgcgccctgcaactcgccggggccgatgttctgttagtcgattccgatccccagggcagtgcccgcgattgggcggccgtgcgggaagatcaaccgctaaccgttgtcggcatcgaccgcccgacgattgaccgcgacgtgaaggccatcggccggcgcgacttcgtagtgatcgacggagcgccccaggcggcggacttggctgtgtccgcgatcaaggcagccgacttcgtgctgattccggtgcagccaagcccttacgacatatgggccaccgccgacctggtggagctggttaagcagcgcattgaggtcacggatggaaggctacaagcggcctttgtcgtgtcgcgggcgatcaaaggcacgcgcatcggcggtgaggttgccgaggcgctggccgggtacgagctgcccattcttgagtcccgtatcacgcagcgcgtgagctacccaggcactgccgccgccggcacaaccgttcttgaatcagaacccgagggcgacgctgcccgcgaggtccaggcgctggccgctgaaattaaatcaaaactcatttga

SEQ ID NO: 272 - DNA, 1176 bp, Artificial sequence
  synthetic
  CDS (1)..(1176): pVS1 RepA
atgccccatgtgtggaggaacgggcggttggccaggcgtaagcggctgggttgtctgccggccctgcaatggcactggaacccccaagcccgaggaatcggcgtgagcggtcgcaaaccatccggcccggtacaaatcggcgcggcgctgggtgatgacctggtggagaagttgaaggccgcgcaggccgcccagcggcaacgcatcgaggcagaagcacgccccggtgaatcgtggcaagcagccgctgatcgaatccgcaaagaatcccggcaaccgccggcagccggtgcgccgtcgattaggaagccgcccaagggcgacgagcaaccagattttttcgttccgatgctctatgacgtgggcacccgcgatagtcgcagcatcatggacgtggccgttttccgtctgtcgaagcgtgaccgacgagctggcgaggtgatccgctacgagcttccagacgggcacgtagaggtttccgcagggccggccggcatggccagtgtgtgggattacgacctggtactgatggcggtttcccatctaaccgaatccatgaaccgataccgggaagggaagggagacaagcccggccgcgtgttccgtccacacgttgcggacgtactcaagttctgccggcgagccgatggcggaaagcagaaagacgacctggtagaaacctgcattcggttaaacaccacgcacgttgccatgcagcgtacgaagaaggccaagaacggccgcctggtgacggtatccgagggtgaagccttgattagccgctacaagatcgtaaagagcgaaaccgggcggccggagtacatcgagatcgagctagctgattggatgtaccgcgagatcacagaaggcaagaacccggacgtgctgacggttcaccccgattactttttgatcgatcccggcatcggccgttttctctaccgcctggcacgccgcgccgcaggcaaggcagaagccagatggttgttcaagacgatctacgaacgcagtggcagcgccggagagttcaagaagttctgtttcaccgtgcgcaagctgatcgggtcaaatgacctgccggagtacgatttgaaggaggaggcggggcaggctggcccgatcctagtcatgcgctaccgcaacctgatcgagggcgaagcatccgccggttcctaa

SEQ ID NO: 273 - protein, 391 aa, Artificial sequence
  Synthetic Construct
MPHVWRNGRLARRKRLGCLPALQWHWNPQARGIGVSGRKPSGPVQIGAALGDDLVEKLKAAQAAQRQRIEAEARPGESWQAAADRIRKESRQPPAAGAPSIRKPPKGDEQPDFFVPMLYDVGTRDSRSIMDVAVFRLSKRDRRAGEVIRYELPDGHVEVSAGPAGMASVWDYDLVLMAVSHLTESMNRYREGKGDKPGRVFRPHVADVLKFCRRADGGKQKDDLVETCIRLNTTHVAMQRTKKAKNGRLVTVSEGEALISRYKIVKSETGRPEYIEIELADWMYREITEGKNPDVLTVHPDYFLIDPGIGRFLYRLARRAAGKAEARWLFKTIYERSGSAGEFKKFCFTVRKLIGSNDLPEYDLKEEAGQAGPILVMRYRNLIEGEASAGS

SEQ ID NO: 274 - DNA, 195 bp, Artificial sequence
  synthetic
  rep_origin (1)..(195): pVS1 oriV
tgtggatagcacgtacattgggaacccaaagccgtacattgggaaccggaacccgtacattgggaacccaaagccgtacattgggaaccggtcacacatgtaagtgactgatataaaagagaaaaaaggcgatttttccgcctaaaactctttaaaacttattaaaactcttaaaacccgcctggcctgtgcata

SEQ ID NO: 275 - DNA, 849 bp, Artificial sequence
  synthetic
  CDS (1)..(849): mTurquoise2 fluorescent protein
atgaacaataacgatctctttcaggcatcacgtcggcgttttctggcacaactcggcggcttaaccgtcgccgggatgctggggccgtcattgttaacgccgcgacgtgcgactgcggcgcaagcggcgaattccaagggcgaagagctctttaccggcgttgtgccaatcctcgtggaactcgatggcgacgtgaatggccataaattttccgtgagcggcgaaggcgagggcgatgcaacttacggcaaactgaccctgaaatttatctgcactaccggcaaactccctgttccttggcctaccctcgtgaccaccttgagctggggcgtccaatgctttgcccgttaccccgaccatatgaaacaacacgatttcttcaaaagcgccatgccagaaggctatgttcaagaacgcaccattttcttcaaagacgacggcaactacaaaactcgggccgaagtgaaattcgaaggcgataccctggtcaaccgcatcgaactgaagggcattgattttaaggaagacggtaacatcctgggccacaaactcgaatacaactatttctccgacaacgtttacatcaccgctgacaaacagaaaaacggcatcaaagctaattttaaaatccgccataatatcgaagacggcggtgttcaactcgcagaccattatcaacaaaatacccccatcggcgacggccccgttctgctgcctgacaaccattacctctccacccaaagtaaactcagtaaagatcctaacgaaaaacgcgaccacatggttctgctggagttcgtgaccgcggccggcatcaccctgggcatggacgagctgtacaaggcgtaa

SEQ ID NO: 276 - protein, 282 aa, Artificial sequence
  Synthetic Construct
MNNNDLFQASRRRFLAQLGGLTVAGMLGPSLLTPRRATAAQAANSKGEELFTGVVPILVELDGDVNGHKFSVSGEGEGDATYGKLTLKFICTTGKLPVPWPTLVTTLSWGVQCFARYPDHMKQHDFFKSAMPEGYVQERTIFFKDDGNYKTRAEVKFEGDTLVNRIELKGIDFKEDGNILGHKLEYNYFSDNVYITADKQKNGIKANFKIRHNIEDGGVQLADHYQQNTPIGDGPVLLPDNHYLSTQSKLSKDPNEKRDHMVLLEFVTAAGITLGMDELYKA

SEQ ID NO: 277 - DNA, 1200 bp, Artificial sequence
  synthetic
  CDS (1)..(1200): TcR
atgaaacccaacatacccctgatcgtaattctgagcactgtcgcgctcgacgctgtcggcatcggcctgattatgccggtgctgccgggcctcctgcgcgatctggttcactcgaacgacgtcaccgcccactatggcattctgctggcgctgtatgcgttggtgcaatttgcctgcgcacctgtgctgggcgcgctgtcggatcgtttcgggcggcggccaatcttgctcgtctcgctggccggcgccactgtcgactacgccatcatggcgacagcgcctttcctttgggttctctatatcgggcggatcgtggccggcatcaccggggcgactggggcggtagccggcgcttatattgccgatatcactgatggcgatgagcgcgcgcggcacttcggcttcatgagcgcctgtttcgggttcgggatggtcgcgggacctgtgctcggtgggctgatgggcggtttctccccccacgctccgttcttcgccgcggcagccttgaacggcctcaatttcctgacgggctgtttccttttgccggagtcgcacaaaggcgaacgccggccgttacgccgggaggctctcaacccgctcgcttcgttccggtgggcccggggcatgaccgtcgtcgccgccctgatggcggtcttcttcatcatgcaacttgtcggacaggtgccggccgcgctttgggtcattttcggcgaggatcgctttcactgggacgcgaccacgatcggcatttcgcttgccgcatttggcattctgcattcactcgcccaggcaatgatcaccggccctgtagccgcccggctcggcgaaaggcgggcactcatgctcggaatgattgccgacggcacaggctacatcctgcttgccttcgcgacacggggatggatggcgttcccgatcatggtcctgcttgcttcgggtggcatcggaatgccggcgctgcaagcaatgttgtccaggcaggtggatgaggaacgtcaggggcagctgcaaggctcactggcggcgctcaccagcctgacctcgatcgtcggacccctcctcttcacggcgatctatgcggcttctataacaacgtggaacgggtgggcatggattgcaggcgctgccctctacttgctctgcctgccggcgctgcgtcgcgggctttggagcggcgcagggcaacgagccgatcgctga

SEQ ID NO: 278 - protein, 399 aa, Artificial sequence
  Synthetic Construct
MKPNIPLIVILSTVALDAVGIGLIMPVLPGLLRDLVHSNDVTAHYGILLALYALVQFACAPVLGALSDRFGRRPILLVSLAGATVDYAIMATAPFLWVLYIGRIVAGITGATGAVAGAYIADITDGDERARHFGFMSACFGFGMVAGPVLGGLMGGFSPHAPFFAAAALNGLNFLTGCFLLPESHKGERRPLRREALNPLASFRWARGMTVVAALMAVFFIMQLVGQVPAALWVIFGEDRFHWDATTIGISLAAFGILHSLAQAMITGPVAARLGERRALMLGMIADGTGYILLAFATRGWMAFPIMVLLASGGIGMPALQAMLSRQVDEERQGQLQGSLAALTSLTSIVGPLLFTAIYAASITTWNGWAWIAGAALYLLCLPALRRGLWSGAGQRADR

SEQ ID NO: 279 - DNA, 6662 bp, Artificial sequence; identical to SEQ ID NO: 184
  synthetic
  misc_feature (1)..(6662): plasmid pshRNA-scrambled (CSHCTR001-mU6 OSNEG20)

SEQ ID NO: 280 - DNA, 58 bp, Artificial Sequence; identical to SEQ ID NO: 186
  synthetic
  misc_feature (1)..(58): shRNA (OSNEG20)

SEQ ID NO: 281 - DNA, 6666 bp, Artificial sequence
  synthetic
  misc_feature (1)..(6666): plasmid pshRNA-CD3d-c (HSH02212-mU6-c-CD3D)
gaattcgcggccctagcttgggatctttgtgaaggaaccttacttctgtggtgtgacataattggacaaactacctacagagatttaaagctctaaggtaaatataaaatttttaagtgtataatgtgttaaactagctgcatatgcttgctgcttgagagttttgcttactgagtatgatttatgaaaatattatacacaggagctagtgattctaattgtttgtgtattttagattcacagtcccaaggctcatttcaggcccctcagtcctcacagtctgttcatgatcataatcagccataccacatttgtagaggttttacttgctttaaaaaacctcccacacctccccctgaacctgaaacataaaatgaatgcaattgttgttgttaacttgtttattgcagcttataatggttacaaataaagcaatagcatcacaaatttcacaaataaagcatttttttcactgcattctagttgtggtttgtccaaactcatcaatgtatcttatcatgtctggatcgatcctgcattaatgaatcggccaacgcgcggggagaggcggtttgcgtattggctggcgtaatagcgaagaggcccgcaccgatcgcccttcccaacagttgcgcagcctgaatggcgaatgggacgcgccctgtagcggcgcattaagcgcggcgggtgtggtggttacgcgcagcgtgaccgctacacttgccagcgccctagcgcccgctcctttcgctttcttcccttcctttctcgccacgttcgccggctttctccgtcaagctctaaatcgggggctccctttagggttccgatttagtgctttacggcacctcgaccccaaaaaacttgattagggtgatggttcacgtagtgggccatcgccctgatagacggtttttcgccctttgacgttggagtccacgttctttaatagtggactcttgttccaaactggaacaacactcaaccctatctcggtctattcttttgatttataagggattttgccgatttcggcctattggttaaaaaatgagctgatttaacaaaaatttaacgcgaattttaacaaaatattaacgcttacaatttcctgatgcggtattttctccttacgcatctgtgcggtatttcacaccgcatacgcggatctgcgcagcaccatggcctgaaataacctctgaaagaggaacttggttaggaaccttctgaggcggaaagaaccagctgtggaatgtgtgtcagttagggtgtggaaagtccccaggctccccagcaggcagaagtatgcaaagcatgcatctcaattagtcagcaaccaggtgtggaaagtccccaggctccccagcaggcagaagtatgcaaagcatgcatctcaattagtcagcaaccatagtcccgcccctaactccgcccatcccgcccctaactccgcccagttccgcccattctccgccccatggctgactaattttttttatttatgcagaggccgaggccgcctcggcctctgagctattccagaagtagtgaggaggcttttttggaggcctaggcttttgcaaaaagcttgattcttctgacacaacagtctcgaacttaaggctagagccaccatgaccgagtacaagcccacggtgcgcctcgccacccgcgacgacgtccccagggccgtacgcaccctcgccgccgcgttcgccgactaccccgccacgcgccacaccgtcgatccggaccgccacatcgagcgggtcaccgagctgcaagaactcttcctcacgcgcgtcgggctcgacatcggcaaggtgtgggtcgcggacgacggcgccgcggtggcggtctggaccacgccggagagcgtcgaagcgggggcggtgttcgccgagatcggcccgcgcatggccgagttgagcggttcccggctggccgcgcagcaacagatggaaggcctcctggcgccgcaccggcccaaggagcccgcgtggttcctggccaccgtcggcgtctcgcccgaccaccagggcaagggtctgggcagcgccgtcgtgctccccggagtggaggcggccgagcgcgccggggtgcccgccttcctggagacctccgcgccccgcaacctccccttctacgagcggctcggcttcaccgtcaccgccgacgtcgaggtgcccgaaggaccgcgaacctggtgcatgacccgcaagcccggtgcctgagtttaacgaaatgaccgaccaagcgacgcccaacctgccatcacgatggccgcaataaaatatctttattttcattacatctgtgtgttggttttttgtgtggatcgatagcgataaggatcgatccgcgcatggtgcactctcagtacaatctgctctgatgccgcatagttaagccagccccgacacccgccaacacccgctgacgcgccctgacgggcttgtctgctcccggcatccgcttacagacaagctgtgaccgtctccgggagctgcatgtgtcagaggttttcaccgtcatcaccgaaacgcgcgagacgaaagggcctcgtgatacgcctatttttataggttaatgtcatgataataatggtttcttagacgtcaggtggcacttttcggggaaatgtgcgcggaacccctatttgtttatttttctaaatacattcagatatgtatccgctcatgagacaataaccctgataaatgcttcaataatattgaaaaaggaagagtatgagtattcaacatttccgtgtcgcccttattcccttttttgcggcattttgccttcctgtttttgctcacccagaaacgctggtgaaagtaaaagatgctgaagatcagttgggtgcacgagtgggttacatcgaactggatctcaacagcggtaagatccttgagagttttcgccccgaagaccgttttccaatgatgagcacttttaaagttctgctatgtggcgcggtattatcccgtattgacgccgggcaagagcaactcggtcgccgcatacactattctcagaatgacttggttgagtactcaccagtcacagaaaagcatcttacggatggcatgacagtaagagaattatgcagtgctgccataaccatgagtgataacactgcggccaacttacttctgacaacgatcggaggaccgaaggagctaaccgcttttttgcacaacatgggggatcatgtaactcgccttgatcgttgggaaccggagctgaatgaagccataccaaacgacgagcgtgacaccacgatgcctgtagcaatggcaacaacgttgcgcaaactattaactggcgaactacttactctagcttcccggcaacaattaatagactggatggaggcggataaagttgcaggaccacttctgcgctcggcccttccggctggctggtttattgctgataaatctggagccggtgagcgtgggtctcgcggtatcattgcagcactggggccagatggtaagccctcccgtatcgtagttatctacacgacggggagtcaggcaactatggatgaacgaaatagacagatcgctgagataggtgcctcactgattaagcattggtaactgtcagaccaagtttactcatatatactttagattgatttaaaacttcatttttaatttaaaaggatctaggtgaagatcctttttgataatctcatgaccaaaatcccttaacgtgagttttcgttccactgagcgtcagaccccgtagaaaagatcaaaggatcttcttgagatcctttttttctgcgcgtaatctgctgcttgcaaacaaaaaaaccaccgctaccagcggtggtttgtttgccggatcaagagctaccaactctttttccgaaggtaactggcttcagcagagcgcagataccaaatactgtccttctagtgtagccgtagttaggccaccacttcaagaactctgtagcaccgcctacatacctcgctctgctaatcctgttaccagtggctgctgccagtggcgataagtcgtgtcttaccgggttggactcaagacgatagttaccggataaggcgcagcggtcgggctgaacggggggttcgtgcacacagcccagcttggagcgaacgacctacaccgaactgagatacctacagcgtgagcattgagaaagcgccacgcttcccgaagggagaaaggcggacaggtatccggtaagcggcagggtcggaacaggagagcgcacgagggagcttccagggggaaacgcctggtatctttatagtcctgtcgggtttcgccacctctgacttgagcgtcgatttttgtgatgctcgtcaggggggcggagcctatggaaaaacgccagcaacgcggcctttttacggttcctggccttttgctggccttttgctcacatgttctttcctgcgttatcccctgattctgtggataaccgtattaccgcctttgagtgagctgataccgctcgccgcagccgaacgaccgagcgcagcgagtcagtgagcgaggaagcggaagagcgcccaatacgcaaaccgcctctccccgcgcgttggccgattcattaatgcagagcttgcaattcgcgcgtttttcaatattattgaagcatttatcagggttattgtctcatgagcggatacatatttgaatgtatttagaaaaataaacaaataggggttccgcgcacatttccccgaaaagtgccacctgacgtctaagaaaccattattatcatgacattaacctataaaaataggcgtagtacgaggccctttcactcattagatgcatgtcgttacataacttacggtaaatggcccgcctggctgaccgcccaacgacccccgcccattgacgtcaataatgacgtatgttcccatagtaacgccaatagggactttccattgacgtcaatgggtggagtatttacggtaaactgcccacttggcagtacatcaagtgtatcatatgccaagtacgccccctattgacgtcaatgacggtaaatggcccgcctggcattatgcccagtacatgaccttatgggactttcctacttggcagtacatctacgtattagtcatcgctattaccatggtgatgcggttttggcagtacatcaatgggcgtggatagcggtttgactcacggggatttccaagtctccaccccattgacgtcaatgggagtttgttttggcaccaaaatcaacgggactttccaaaatgtcgtaacaactccgccccattgacgcaaatgggcggtaggcgtgtacggtgggaggtctatataagcagagctcgtttagtgaaccgtcagatcgcctggagacgccatccacgctgttttgacctccatagaagacaccgggaccgatccagcctccggactctagcctaggccgcggaccatgtccggcttgaacgacatcttcgaggcccagaagatcgagtggcacgaggaaaagcttcgaaccatggtgagcaagggcgaggaggataacatggccatcatcaaggagttcatgcgcttcaaggtgcacatggagggctccgtgaacggccacgagttcgagatcgagggcgagggcgagggccgcccctacgagggcacccagaccgccaagctgaaggtgaccaagggtggccccctgcccttcgcctgggacatcctgtcccctcagttcatgtacggctccaaggcctacgtgaagcaccccgccgacatccccgactacttgaagctgtccttccccgagggcttcaagtgggagcgcgtgatgaacttcgaggacggcggcgtggtgaccgtgacccaggactcctccctgcaggacggcgagttcatctacaaggtgaagctgcgcggcaccaacttcccctccgacggccccgtaatgcagaagaagaccatgggctgggaggcctcctccgagcggatgtaccccgaggacggcgccctgaagggcgagatcaagcagaggctgaagctgaaggacggcggccactacgacgctgaggtcaagaccacctacaaggccaagaagcccgtgcagctgcccggcgcctacaacgtcaacatcaagttggacatcacctcccacaacgaggactacaccatcgtggaacagtacgaacgcgccgagggccgccactccaccggcggcatggacgagctgtacaagtagctcgagtgcggccccaaataatgattttattttgactgatagtgacctgttcgttgcaacaaattgatgagcaatgcttttttataatgccaactttgtacaaaaaagcaggctgcgagcgatcgctcgggcaggaagagggcctatttcccatgattccttcatatttgcatatacgatacaaggctgttagagagataattagaattaatttgactgtaaacacaaagatattagtacaaaatacgtgacgtagaaagtaataatttcttgggtagtttgcagttttaaaattatgttttaaaatggactatcatatgcttaccgtaacttgaaagtatttcgatttcttgggtttatatatcttgtggaaaggacgaggatccgggtgtaatgggacagatatattcaagagatatatctgtcccattacaccttttttg

SEQ ID NO: 282 - protein, 33 aa, Artificial sequence
  synthetic
  PEPTIDE (1)..(33): AA sequence added from the HxB2 reference sequence to the sequence beginning, to improve alignment numbering
MRVKEKYQHLWRWGWRWGTMLLGMLMICSATEK

SEQ ID NO: 283 - DNA, 4842 bp, Artificial sequence
  synthetic
  CDS (1)..(4842): N-terminal signal peptide of autotransporter antigen 43 (FLU) protein, HIV-1 glycoprotein 120, first linker peptide, HIV-1 glycoprotein 41, and second linker, autochaperone (AC1) domain and -chain translocator domain of said autotransporter antigen
atgaaaagacacctaaatacatgttataggcttgtttggaaccacatgaccggcgcgttcgtcgtggcaagcgagttggcgagagcacgtggcaagcgtggcggagtggcagtggcgctgtctttggcagccgtaacaagcttaccggtcctgagcgcggccgaaaacctgtgggttaccgtctactatggtgtaccggtttggaaagacgcggagaccacgctgttctgtgcatcagatgcaaaagcgtatgaaaccgagaagcataacgtttgggcgacccatgcctgcgtgccgacggatccgaatccgcaagagattcacttagagtcagtcaccgaagaatttaatatgtggaaaaataacatggttgagcagatgcacacggacatcatttctctgtgggaccagagcttaaagccgtgcgtaaagttgaccccactgtgtgttaccttgcaatgtaccggtgtgaccaataccattaccgacgatatgcgtggcgaactgaaaagctgtagcttttatatgaccaccgagctgcgcgacaagaaacagaaagtgtacagcctgttctaccgcctggacgtggtgcagattaacgagaaccaaggtacccggagcagtaatagcaataaagaatatcgtctgattaactgcacaacgtccgccatcacccaagcctgcccgaaagtgtcttttgaaccgatcccgatacactattgcgcgccggccggttttgcgatcctgaagtgcaaagataagaaatttagcggcacaggcccatgcccgagcgtttccaccgtgcagtgtacccacggaatcaagccggtagttagcacccaactgcttctggacggttctctagcggaggaagaggttatgattcgctccgaaagcataaccaacaacgcgaaaaatattttggttcaatttaacactccggttcaaatcacctgtacgcgtccgaactacaatacgcgtaaatccatcagaattggtccgggtcaggcgttctacgcgacgggcgacatcatcggcgacatccgccaagcgcactgcagcgtttccaaagcgacctggggcgaaacccttggtaaggttgttaagcagctgcgtaaacactttggcacgaacaccatcattcgtttcgctccgtcttcaggcggcgacttggaagttactacccacagcttcaattgcggtggcgagttcttttactgcagcacctctggcctgttcagttctacctggattagcaccacgtctgtgcagggttcaagctccactggctcaatcgatagcataaccttgccgtgccgtatcaagcaaattattaacatgtggcaacgtattggtcaagcaatgtatgcgccgcctattcagggtgttatccgttgtgttagcagcatcaccggtctgattctgacccgtgatggcggtagcacgacctccactactgaaacctttcgtccgggtggtggcgacatgcgtgataattggcgttccgaattgtacaagtacaaggttgtgaaaatagaaccactgggtgtggcgccgacgcgcgcgaaacgccgcgttgttggtggtggcggcgggtcgggtggtggcggcagcgcagtcggtattggtgcggtttttctgggcttcctgggtgcggcggggtccacaatgggtgctgcgtctatgaccctgaccgtccaggctcgtaacctgttgtccggcattgtgcagcagcagtccaatctgttgcgtgcgattgaggcacagcaacatctgctgaagctgaccgtgtggggtatcaagcaactgcaggcacgagtgttggcggtcgagcgttatctgagggaccagcaactgctgggcatctggggctgctcgggcaagctgatctgcaccacgaacgtgccgtggggctcctcttggagcaatcgtagcttaagcgagatctgggactcaatgacctggttgcaatgggataaagagattagcagctatacccaaattatctatggcctgttggaggaaagccagaatcagcaagaaaagaacgagcaggatctgctggcgctggacaagtgggcgtccctgtggaactggtttgatatcagcaactggctgtggtacattaagatcggtggccaaagcttacagggtcgtgctgttaacactacgttgaatggaggcgagcagtggatgcatgaaggtgcgatcgccaccgggaccgtgattaatgacaagggctggcaagttgttaaaccgggtaccgtagccacggacacagttgtcaataccggcgccgaaggtggtccggatgcagagaacggtgacaccggtcagttcgttcgtggagacgcggtccgtaccaccattaataaaaatggtcgtcagattgtacgtgccgaaggtaccgctaatacgaccgttgtctacgcggggggcgatcaaaccgtgcacggtcacgccctggacaccacgctgaacggtggttatcagtatgttcacaacggtggtacggctagcgatacagtggtgaactccgacggttggcaaattgttaagaacggcggtgtagccggcaacaccaccgttaaccaaaaaggcagattacaagttgatgcaggaggtacggcgaccaacgttaccctcaagcagggtggcgcactggttacttcaaccgcggcgacggtgaccggcatcaaccgcctgggcgcattctctgttgttgagggcaaggcagacaacgtggtcctggagaacggaggccgtctggatgtgctgacgggtcataccgcgaccaacacgcgggtggacgacggcggtacgctggatgtccgcaatggcggaaccgccaccaccgtgagtatgggtaacggtggtgtcttgctggcagatagcggcgcggcggtttcgggcacccgatctgacggtaaggctttctccatcggcggcgggcaggccgatgcactgatgctggaaaagggtagctccttcacccttaacgcgggtgacaccgcaacggacaccacagtgaacggcggtttgttcaccgctagaggtgggaccctcgcgggcaccacgaccctgaacaacggtgcgatcttgaccctgtccggtaaaaccgtgaataacgacaccttaaccatccgcgaaggtgacgctctgttgcaagggggctccctgacaggtaacgggagcgtggaaaaatcaggctctgggactctcactgttagcaacaccacccttacccagaaagcggtgaatctcaatgaagggacgttaaccttaaacgattcgaccgtgacgacagacgtgattgcgcagcgtggcaccgctctgaagctcaccggcagtacggtgctcaacggtgcgatcgatccgacaaacgtgactctggcttctggcgctacctggaatattccggataatgctactgtgcaatccgtggttgatgatttgagccatgcaggtcaaatccattttaccagcacccgcaccggcaaatttgttcccgcaacgttgaaggttaagaacctgaacggtcagaatggcacgatttccttacgcgtgcgtcccgatatggcgcagaacaacgcggatcgtctggtgattgatggtggccgtgcaactggtaagaccatcctgaacctggttaacgcaggtaatagcgcgagcggactggcgaccagcggcaagggtatccaggttgttgaggcgattaacggcgcgaccaccgaagagggtgcgttcgtgcagggtaaccgcctgcaggccggcgcattcaactacagcctgaaccgtgacagcgatgaaagctggtacctgcgatccgagaacgcgtatcgcgcggaagtaccgctgtacgctagcatgctgacgcaggctatggattatgaccgcatcgtcgccggcagccgttcccatcagaccggtgtcaatggcgagaacaacagcgtccgcctgtctattcagggtggtcacctgggtcatgataataatggtggcatcgcacgtggtgccaccccggaaagctccggttcttatggtttcgttcgtttggagggcgacctgatgcgtactgaggttgcgggtatgagcgtgacggctggcgtgtacggtgcagcaggccacagctctgtcgacgtgaaagacgatgacggttctcgtgcgggcaccgtacgagatgacgccggttccctgggtggttacctgaatcttgtccacacctctagcggcttgtgggcagacattgtggcccaaggcacacgtcatagcatgaaagcaagttcggacaataatgattttcgtgcgcgcggttggggttggctgggttccttagagaccggtcttccgtttagcatcacggataacctgatgctggaaccgcagctccaatatacctggcagggcctgagcctagacgacggaaaagacaacgccggctacgttaaattcggccatggtagcgcccaacatgttcgcgctggctttcgtctgggtagccataatgacatgacctttggcgagggcacctcgtcaagagccccgctgcgcgatagcgcgaaacacagcgtctctgaactgccggttaactggtgggtccaaccgagcgtgatccgtactttctcgagccgtggtgatatgcgtgtaggcacaagcaccgcgggttctggaatgaccttcagcccgtcccaaaacggtacatccctcgacctgcaggcgggtttggaggcgcgcgttagagaaaatatcactctaggtgtgcaggcgggttacgcgcacagcgttagcggtagcagcgcggaagggtacaacggccaggcaaccctcaacgtgacgttctaa

SEQ ID NO: 284 - protein, 1613 aa, Artificial sequence
  Synthetic Construct
MKRHLNTCYRLVWNHMTGAFVVASELARARGKRGGVAVALSLAAVTSLPVLSAAENLWVTVYYGVPVWKDAETTLFCASDAKAYETEKHNVWATHACVPTDPNPQEIHLESVTEEFNMWKNNMVEQMHTDIISLWDQSLKPCVKLTPLCVTLQCTGVTNTITDDMRGELKSCSFYMTTELRDKKQKVYSLFYRLDVVQINENQGTRSSNSNKEYRLINCTTSAITQACPKVSFEPIPIHYCAPAGFAILKCKDKKFSGTGPCPSVSTVQCTHGIKPVVSTQLLLDGSLAEEEVMIRSESITNNAKNILVQFNTPVQITCTRPNYNTRKSIRIGPGQAFYATGDIIGDIRQAHCSVSKATWGETLGKVVKQLRKHFGTNTIIRFAPSSGGDLEVTTHSFNCGGEFFYCSTSGLFSSTWISTTSVQGSSSTGSIDSITLPCRIKQIINMWQRIGQAMYAPPIQGVIRCVSSITGLILTRDGGSTTSTTETFRPGGGDMRDNWRSELYKYKVVKIEPLGVAPTRAKRRVVGGGGGSGGGGSAVGIGAVFLGFLGAAGSTMGAASMTLTVQARNLLSGIVQQQSNLLRAIEAQQHLLKLTVWGIKQLQARVLAVERYLRDQQLLGIWGCSGKLICTTNVPWGSSWSNRSLSEIWDSMTWLQWDKEISSYTQIIYGLLEESQNQQEKNEQDLLALDKWASLWNWFDISNWLWYIKIGGQSLQGRAVNTTLNGGEQWMHEGAIATGTVINDKGWQVVKPGTVATDTVVNTGAEGGPDAENGDTGQFVRGDAVRTTINKNGRQIVRAEGTANTTVVYAGGDQTVHGHALDTTLNGGYQYVHNGGTASDTVVNSDGWQIVKNGGVAGNTTVNQKGRLQVDAGGTATNVTLKQGGALVTSTAATVTGINRLGAFSVVEGKADNVVLENGGRLDVLTGHTATNTRVDDGGTLDVRNGGTATTVSMGNGGVLLADSGAAVSGTRSDGKAFSIGGGQADALMLEKGSSFTLNAGDTATDTTVNGGLFTARGGTLAGTTTLNNGAILTLSGKTVNNDTLTIREGDALLQGGSLTGNGSVEKSGSGTLTVSNTTLTQKAVNLNEGTLTLNDSTVTTDVIAQRGTALKLTGSTVLNGAIDPTNVTLASGATWNIPDNATVQSVVDDLSHAGQIHFTSTRTGKFVPATLKVKNLNGQNGTISLRVRPDMAQNNADRLVIDGGRATGKTILNLVNAGNSASGLATSGKGIQVVEAINGATTEEGAFVQGNRLQAGAFNYSLNRDSDESWYLRSENAYRAEVPLYASMLTQAMDYDRIVAGSRSHQTGVNGENNSVRLSIQGGHLGHDNNGGIARGATPESSGSYGFVRLEGDLMRTEVAGMSVTAGVYGAAGHSSVDVKDDDGSRAGTVRDDAGSLGGYLNLVHTSSGLWADIVAQGTRHSMKASSDNNDFRARGWGWLGSLETGLPFSITDNLMLEPQLQYTWQGLSLDDGKDNAGYVKFGHGSAQHVRAGFRLGSHNDMTFGEGTSSRAPLRDSAKHSVSELPVNWWVQPSVIRTFSSRGDMRVGTSTAGSGMTFSPSQNGTSLDLQAGLEARVRENITLGVQAGYAHSVSGSSAEGYNGQATLNVTF

SEQ ID NO: 285 - DNA, 1980 bp, Artificial sequence
  synthetic
  CDS (1)..(1980): gp120+linker+gp41
agcgcggccgaaaacctgtgggttaccgtctactatggtgtaccggtttggaaagacgcggagaccacgctgttctgtgcatcagatgcaaaagcgtatgaaaccgagaagcataacgtttgggcgacccatgcctgcgtgccgacggatccgaatccgcaagagattcacttagagtcagtcaccgaagaatttaatatgtggaaaaataacatggttgagcagatgcacacggacatcatttctctgtgggaccagagcttaaagccgtgcgtaaagttgaccccactgtgtgttaccttgcaatgtaccggtgtgaccaataccattaccgacgatatgcgtggcgaactgaaaagctgtagcttttatatgaccaccgagctgcgcgacaagaaacagaaagtgtacagcctgttctaccgcctggacgtggtgcagattaacgagaaccaaggtacccggagcagtaatagcaataaagaatatcgtctgattaactgcacaacgtccgccatcacccaagcctgcccgaaagtgtcttttgaaccgatcccgatacactattgcgcgccggccggttttgcgatcctgaagtgcaaagataagaaatttagcggcacaggcccatgcccgagcgtttccaccgtgcagtgtacccacggaatcaagccggtagttagcacccaactgcttctggacggttctctagcggaggaagaggttatgattcgctccgaaagcataaccaacaacgcgaaaaatattttggttcaatttaacactccggttcaaatcacctgtacgcgtccgaactacaatacgcgtaaatccatcagaattggtccgggtcaggcgttctacgcgacgggcgacatcatcggcgacatccgccaagcgcactgcagcgtttccaaagcgacctggggcgaaacccttggtaaggttgttaagcagctgcgtaaacactttggcacgaacaccatcattcgtttcgctccgtcttcaggcggcgacttggaagttactacccacagcttcaattgcggtggcgagttcttttactgcagcacctctggcctgttcagttctacctggattagcaccacgtctgtgcagggttcaagctccactggctcaatcgatagcataaccttgccgtgccgtatcaagcaaattattaacatgtggcaacgtattggtcaagcaatgtatgcgccgcctattcagggtgttatccgttgtgttagcagcatcaccggtctgattctgacccgtgatggcggtagcacgacctccactactgaaacctttcgtccgggtggtggcgacatgcgtgataattggcgttccgaattgtacaagtacaaggttgtgaaaatagaaccactgggtgtggcgccgacgcgcgcgaaacgccgcgttgttggtggtggcggcgggtcgggtggtggcggcagcgcagtcggtattggtgcggtttttctgggcttcctgggtgcggcggggtccacaatgggtgctgcgtctatgaccctgaccgtccaggctcgtaacctgttgtccggcattgtgcagcagcagtccaatctgttgcgtgcgattgaggcacagcaacatctgctgaagctgaccgtgtggggtatcaagcaactgcaggcacgagtgttggcggtcgagcgttatctgagggaccagcaactgctgggcatctggggctgctcgggcaagctgatctgcaccacgaacgtgccgtggggctcctcttggagcaatcgtagcttaagcgagatctgggactcaatgacctggttgcaatgggataaagagattagcagctatacccaaattatctatggcctgttggaggaaagccagaatcagcaagaaaagaacgagcaggatctgctggcgctggacaagtgggcgtccctgtggaactggtttgatatcagcaactggctgtggtacattaagatc

SEQ ID NO: 286 - protein, 660 aa, Artificial sequence
  Synthetic Construct
SAAENLWVTVYYGVPVWKDAETTLFCASDAKAYETEKHNVWATHACVPTDPNPQEIHLESVTEEFNMWKNNMVEQMHTDIISLWDQSLKPCVKLTPLCVTLQCTGVTNTITDDMRGELKSCSFYMTTELRDKKQKVYSLFYRLDVVQINENQGTRSSNSNKEYRLINCTTSAITQACPKVSFEPIPIHYCAPAGFAILKCKDKKFSGTGPCPSVSTVQCTHGIKPVVSTQLLLDGSLAEEEVMIRSESITNNAKNILVQFNTPVQITCTRPNYNTRKSIRIGPGQAFYATGDIIGDIRQAHCSVSKATWGETLGKVVKQLRKHFGTNTIIRFAPSSGGDLEVTTHSFNCGGEFFYCSTSGLFSSTWISTTSVQGSSSTGSIDSITLPCRIKQIINMWQRIGQAMYAPPIQGVIRCVSSITGLILTRDGGSTTSTTETFRPGGGDMRDNWRSELYKYKVVKIEPLGVAPTRAKRRVVGGGGGSGGGGSAVGIGAVFLGFLGAAGSTMGAASMTLTVQARNLLSGIVQQQSNLLRAIEAQQHLLKLTVWGIKQLQARVLAVERYLRDQQLLGIWGCSGKLICTTNVPWGSSWSNRSLSEIWDSMTWLQWDKEISSYTQIIYGLLEESQNQQEKNEQDLLALDKWASLWNWFDISNWLWYIKI

SEQ ID NO: 287 - DNA, 153 bp, E. coli; identical to SEQ ID NO: 171
  CDS (1)..(153): N-terminal signal peptide of the autotransporter antigen 43 (FLU) protein

SEQ ID NO: 288 - protein, 51 aa, E. coli
MKRHLNTCYRLVWNHMTGAFVVASELARARGKRGGVAVALSLAAVTSLPVL

SEQ ID NO: 289 - DNA, 2709 bp, E. coli
  CDS (1)..(2709): FLU protein: linker+AC1+betachain
ggtggccaaagcttacagggtcgtgctgttaacactacgttgaatggaggcgagcagtggatgcatgaaggtgcgatcgccaccgggaccgtgattaatgacaagggctggcaagttgttaaaccgggtaccgtagccacggacacagttgtcaataccggcgccgaaggtggtccggatgcagagaacggtgacaccggtcagttcgttcgtggagacgcggtccgtaccaccattaataaaaatggtcgtcagattgtacgtgccgaaggtaccgctaatacgaccgttgtctacgcggggggcgatcaaaccgtgcacggtcacgccctggacaccacgctgaacggtggttatcagtatgttcacaacggtggtacggctagcgatacagtggtgaactccgacggttggcaaattgttaagaacggcggtgtagccggcaacaccaccgttaaccaaaaaggcagattacaagttgatgcaggaggtacggcgaccaacgttaccctcaagcagggtggcgcactggttacttcaaccgcggcgacggtgaccggcatcaaccgcctgggcgcattctctgttgttgagggcaaggcagacaacgtggtcctggagaacggaggccgtctggatgtgctgacgggtcataccgcgaccaacacgcgggtggacgacggcggtacgctggatgtccgcaatggcggaaccgccaccaccgtgagtatgggtaacggtggtgtcttgctggcagatagcggcgcggcggtttcgggcacccgatctgacggtaaggctttctccatcggcggcgggcaggccgatgcactgatgctggaaaagggtagctccttcacccttaacgcgggtgacaccgcaacggacaccacagtgaacggcggtttgttcaccgctagaggtgggaccctcgcgggcaccacgaccctgaacaacggtgcgatcttgaccctgtccggtaaaaccgtgaataacgacaccttaaccatccgcgaaggtgacgctctgttgcaagggggctccctgacaggtaacgggagcgtggaaaaatcaggctctgggactctcactgttagcaacaccacccttacccagaaagcggtgaatctcaatgaagggacgttaaccttaaacgattcgaccgtgacgacagacgtgattgcgcagcgtggcaccgctctgaagctcaccggcagtacggtgctcaacggtgcgatcgatccgacaaacgtgactctggcttctggcgctacctggaatattccggataatgctactgtgcaatccgtggttgatgatttgagccatgcaggtcaaatccattttaccagcacccgcaccggcaaatttgttcccgcaacgttgaaggttaagaacctgaacggtcagaatggcacgatttccttacgcgtgcgtcccgatatggcgcagaacaacgcggatcgtctggtgattgatggtggccgtgcaactggtaagaccatcctgaacctggttaacgcaggtaatagcgcgagcggactggcgaccagcggcaagggtatccaggttgttgaggcgattaacggcgcgaccaccgaagagggtgcgttcgtgcagggtaaccgcctgcaggccggcgcattcaactacagcctgaaccgtgacagcgatgaaagctggtacctgcgatccgagaacgcgtatcgcgcggaagtaccgctgtacgctagcatgctgacgcaggctatggattatgaccgcatcgtcgccggcagccgttcccatcagaccggtgtcaatggcgagaacaacagcgtccgcctgtctattcagggtggtcacctgggtcatgataataatggtggcatcgcacgtggtgccaccccggaaagctccggttcttatggtttcgttcgtttggagggcgacctgatgcgtactgaggttgcgggtatgagcgtgacggctggcgtgtacggtgcagcaggccacagctctgtcgacgtgaaagacgatgacggttctcgtgcgggcaccgtacgagatgacgccggttccctgggtggttacctgaatcttgtccacacctctagcggcttgtgggcagacattgtggcccaaggcacacgtcatagcatgaaagcaagttcggacaataatgattttcgtgcgcgcggttggggttggctgggttccttagagaccggtcttccgtttagcatcacggataacctgatgctggaaccgcagctccaatatacctggcagggcctgagcctagacgacggaaaagacaacgccggctacgttaaattcggccatggtagcgcccaacatgttcgcgctggctttcgtctgggtagccataatgacatgacctttggcgagggcacctcgtcaagagccccgctgcgcgatagcgcgaaacacagcgtctctgaactgccggttaactggtgggtccaaccgagcgtgatccgtactttctcgagccgtggtgatatgcgtgtaggcacaagcaccgcgggttctggaatgaccttcagcccgtcccaaaacggtacatccctcgacctgcaggcgggtttggaggcgcgcgttagagaaaatatcactctaggtgtgcaggcgggttacgcgcacagcgttagcggtagcagcgcggaagggtacaacggccaggcaaccctcaacgtgacgttctaa

SEQ ID NO: 290 - protein, 902 aa, E. coli
GGQSLQGRAVNTTLNGGEQWMHEGAIATGTVINDKGWQVVKPGTVATDTVVNTGAEGGPDAENGDTGQFVRGDAVRTTINKNGRQIVRAEGTANTTVVYAGGDQTVHGHALDTTLNGGYQYVHNGGTASDTVVNSDGWQIVKNGGVAGNTTVNQKGRLQVDAGGTATNVTLKQGGALVTSTAATVTGINRLGAFSVVEGKADNVVLENGGRLDVLTGHTATNTRVDDGGTLDVRNGGTATTVSMGNGGVLLADSGAAVSGTRSDGKAFSIGGGQADALMLEKGSSFTLNAGDTATDTTVNGGLFTARGGTLAGTTTLNNGAILTLSGKTVNNDTLTIREGDALLQGGSLTGNGSVEKSGSGTLTVSNTTLTQKAVNLNEGTLTLNDSTVTTDVIAQRGTALKLTGSTVLNGAIDPTNVTLASGATWNIPDNATVQSVVDDLSHAGQIHFTSTRTGKFVPATLKVKNLNGQNGTISLRVRPDMAQNNADRLVIDGGRATGKTILNLVNAGNSASGLATSGKGIQVVEAINGATTEEGAFVQGNRLQAGAFNYSLNRDSDESWYLRSENAYRAEVPLYASMLTQAMDYDRIVAGSRSHQTGVNGENNSVRLSIQGGHLGHDNNGGIARGATPESSGSYGFVRLEGDLMRTEVAGMSVTAGVYGAAGHSSVDVKDDDGSRAGTVRDDAGSLGGYLNLVHTSSGLWADIVAQGTRHSMKASSDNNDFRARGWGWLGSLETGLPFSITDNLMLEPQLQYTWQGLSLDDGKDNAGYVKFGHGSAQHVRAGFRLGSHNDMTFGEGTSSRAPLRDSAKHSVSELPVNWWVQPSVIRTFSSRGDMRVGTSTAGSGMTFSPSQNGTSLDLQAGLEARVRENITLGVQAGYAHSVSGSSAEGYNGQATLNVTF

1. An invasive recombinant bacterial cell for use in prevention and/or treatment of an immune-related disorder; said bacterial cell comprising one or more recombinant nucleic acid molecule(s) encoding one or more therapeutic agent(s) for use in prevention and/or treatment of said immune-related disorder in a mammal; wherein said bacterial cell comprises one or more recombinant invasive gene(s) that facilitates invasion and release of said one or more recombinant nucleic acid molecule(s) or said one or more therapeutic agent(s) in a mammalian non-phagocytic immune cell and thereby functions as a bacteria-mediated delivery vector for in vivo or ex vivo delivery of said one or more recombinant nucleic acid molecule(s) or said one or more therapeutic agent(s) to the mammalian non-phagocytic immune cell, and
wherein the immune-related disorder is selected from the group: an autoimmune disorder, cancer, and a lymphoproliferative disorder.

2. The invasive recombinant bacterial cell for use in prevention and/or treatment of an immune-related disorder according to claim 1; wherein said bacterial cell comprises one or more recombinant invasive gene(s) for expressing protein(s) selected from the group:
a. a 1.B.54 family invasin in combination with a 1.C.12.1.7 family cytolysin;
b. viral envelope glycoproteins, preferably comprising a HIV-1 glycoprotein 120 and a HIV-1 glycoprotein 41, in combination with a 1.B.12.8.2 family autotransporter-1; and
c. 1.C.36.3.1 secretion system proteins, preferably comprising Type III GPI-anchored ipaB and ipaC proteins.

3. The invasive recombinant bacterial cell for use in prevention and/or treatment of an immune-related disorder according to claim 1, wherein said therapeutic agent is a recombinant or native DNA, RNA, or protein agent selected from the group:
a. a Chimeric Antigen Receptor
b. a small interfering RNA
c. a protein inhibitor of any one of T cell activation; T cell suppression; T cell proliferation and T cell cell death;
d. a protein inducer of any one of T cell activation; T cell suppression; T cell proliferation and T cell cell death;
e. a cytotoxin
f. a cytokine
g. a chemokine, and
h. a CRISPR-Cas system.

4. The invasive recombinant bacterial cell for use in prevention and/or treatment of an immune-related disorder according to claim 1; wherein a mode of administration of said bacterial cell is selected from the group: intravenous, intra-arterial, intraperitoneal, intralymphatic, sub-cutaneous, intradermal, intramuscular, intraosseous infusion, intra-abdominal, oral, intratumor, intravascular, intravenous bolus; and intravenous drip.

5. The invasive recombinant bacterial cell for use in prevention and/or treatment of an immune-related disorder according to claim 1, wherein the bacterial cell is a species of the genus selected from the group: Escherichia, Bacteroides, Akkermansia, Alistipes, Prevotella, and Parabacteroides.

6. The invasive recombinant bacterial cell for use in prevention and/or treatment of an immune-related disorder according to claim 1, wherein said mammalian non-phagocytic immune cell is a T-lymphocyte, B-lymphocyte, Natural Killer cell, or Basophil.

7. The invasive recombinant bacterial cell for use in prevention and/or treatment of an immune-related disorder according to claim 1, wherein said mammalian non-phagocytic immune cell is a member of the group consisting of a primate, bovine, ovine, porcine, feline, buffalo, canine, goat, equine, donkey, and camel cell.

8. The invasive recombinant bacterial cell for use in prevention and/or treatment of an immune-related disorder according to claim 1, wherein said disorder is any disease which can be treated, prevented, ameliorated by modulating at least one component of the host immune system.

9. The invasive recombinant bacterial cell for use in prevention and/or treatment of an immune-related disorder according to claim 1, wherein said autoimmune disorder is selected from the group: Inflammatory bowel disease; Severe combined immunodeficiency; Organ transplant rejection (graft vs host disease); Asthma; Crohn's disease; Lupus nephritis; Autoimmune hepatitis; Alopecia Areata; Dermatitis; Dermatitis herpetiformis; Epidermolysis bullosa; Hidradenitis suppurativa; Psoriasis; Systemic scleroderma; Diabetes mellitus type 1; Ulcerative colitis; Autoimmune lymphoproliferative syndrome; Rheumatoid arthritis; Systemic lupus erythematosus; Multiple sclerosis; Primary immunodeficiency; and Pyoderma gangrenosum.

10. The invasive recombinant bacterial cell for use in prevention and/or treatment of an immune-related disorder according to claim 1, wherein cancer is selected from the group: Burkitt Lymphoma; Non-Hodgkin Lymphoma; Lymphocytic Leukemia; Myeloid Leukemia; Myelogenous Leukemia; Cutaneous T-Cell Lymphoma; Hodgkin Lymphoma; Multiple Myeloma; T-Cell Lymphoma, Acute lymphoblastic leukemia; Acute myeloid leukemia; Chronic lymphocytic leukemia; Chronic myelogenous leukemia; Cutaneous T-cell lymphoma; Diffuse large B-cell lymphoma; Follicular lymphoma; Hepatosplenic T-cell lymphoma; and Hairy cell leukemia.

11. The invasive recombinant bacterial cell for use in prevention and/or treatment of an immune-related disorder according to claim 1, wherein said lymphoproliferative disorder is selected from the group: post-transplant lymphoproliferative disorder; autoimmune lymphoproliferative syndrome; lymphoid interstitial pneumonia; Epstein-Barr virus-associated lymphoproliferative diseases; Waldenström's macroglobulinemia; Wiskott-Aldrich syndrome; Lymphocyte-variant hypereosinophilia; Pityriasis Lichenoides; and Castleman disease.

12. The invasive recombinant bacterial cell for use in prevention and/or treatment of an immune-related disorder according to claim 1, wherein said recombinant nucleic acid molecule(s) or said therapeutic agent(s) for use in prevention and/or treatment of said immune-related disorder is selected from:
a. a recombinant nucleic acid molecule(s) comprising DNA nuclear targeting sequence(s) for intra-nuclear localization,
b. a recombinant nucleic acid molecule(s) devoid of intra-nuclear targeting sequence(s),
c. a therapeutic agent comprising a protein comprising a nuclear localization sequence for intra-nuclear localization, or
d. a therapeutic agent comprising a protein devoid of intra-nuclear targeting sequences.

13. The invasive recombinant bacterial cell for use in prevention and/or treatment of an immune-related disorder according to claim 1, wherein said bacterial cell is a strain of E. coli, and wherein said one or more recombinant invasive gene(s) encode a 1.B.54.1.2 family invasin and a 1.C.12.1.7 family listeriolysin.

14. The invasive recombinant bacterial cell for use in prevention and/or treatment of an immune-related disorder according to claim 1, wherein said bacterial cell is a strain of E. coli, and wherein said one or more recombinant invasive gene(s) encode a HIV-1 glycoprotein 120 and a HIV-1 glycoprotein 41, in combination with a 1.B.12.8.2 family autotransporter-1.

15. A recombinant bacterial cell comprising recombinant genes encoding a fusion protein comprising an N-terminal signal peptide of an autotransporter antigen 43 (FLU) protein, an HIV-1 glycoprotein 120, a first linker peptide, an HIV-1 glycoprotein 41, and a second linker, an autochaperone (AC1) domain and a β-chain translocator domain of said autotransporter antigen, fused in consecutive order.

16. The recombinant bacterial cell according to claim 15, wherein the amino acid sequence of the HIV-1 glycoprotein 120, the first linker peptide, and the HIV-1 glycoprotein 41 has at least 80% sequence identity to SEQ ID NO.: 10.

17. The recombinant bacterial cell according to claim 15, wherein the amino acid sequence of the fusion protein has at least 80% sequence identity to SEQ ID No.: 284.

18. The recombinant bacterial cell according to claim 15, wherein said recombinant genes encoding the fusion protein are located on a plasmid.

19. (canceled)
